(19) United States
(12) Patent Application Publication
(10) Pub. No.: US 2020/0087365 A1
(43) Pub. Date: Mar. 19, 2020

(54) IMPROVED LAMP CONSTRUCTS COMPRISING CANCER ANTIGENS

(71) Applicant: Immunomic Therapeutics, Inc, Rockville, MD (US)

(72) Inventor: Teri Heiland, New Market, MD (US)

(73) Assignee: Immunomic Therapeutics, Inc, Rockville, MD (US)

(21) Appl. No.: 16/610,133

(22) PCT Filed: May 2, 2018
(86) PCT No.: PCT/US18/30725

§ 371 Date: Nov. 1, 2019

Related U.S. Application Data
(60) Provisional application No. 62/561,760, filed on Sep. 22, 2017.
(60) Provisional application No. 62/500,053, filed on May 2, 2017.

(51) Int. Cl. C07K 14/47; A61K 39/00; A61K 47/62; C07K 14/82

(52) U.S. Cl. CPC C07K 14/4748; A61K 39/0011; A61K 2039/64; C07K 14/82; A61K 2039/6031; A61K 47/62

(57) ABSTRACT

The present invention provides improved LAMP Constructs comprising specific fragments of the LAMP lumenal domain to deliver cancer antigens to immune cells for enhanced processing. These LAMP Constructs can be used for the treatment of disease and in particular hyperproliferative disorders and/or cancer. The improved LAMP Constructs allow for presentation of properly configured three dimensional epitopes for production of an immune response when administered to a subject. The improved LAMP Constructs can be multivalent molecules, and/or can be provided as part of a multivalent vaccine containing two or more LAMP Constructs. The improved LAMP Constructs as described herein can also be used to generate antibodies when administered to a non-human vertebrate.

### BACKGROUND OF THE INVENTION

### Field of the Invention

[0001] The invention relates to improved LAMP Constructs comprising cancer antigens and their use in treating subjects suffering from hyperproliferative disorders and/or cancer. Prime boost protocols utilizing the improved LAMP Constructs described herein are also described.

### Discussion of the Related Art

[0002] In the following discussion, certain articles and methods will be described for background and introductory purposes. Nothing contained herein is to be construed as an “admission” of prior art. Applicant expressly reserves the right to demonstrate, where appropriate, that the articles and methods referenced herein do not constitute prior art under the applicable statutory provisions.

[0003] DNA vaccines are new and promising candidates for the development of both prophylactic and therapeutic vaccines. They are proven to be safe and the lack of immune responses to a vector backbone may be a definitive advantage if repetitive cycles of vaccination are required to achieve clinical benefits. However, one perceived disadvantage of conventional DNA vaccines is their low immunogenicity in humans. A key limiting step in the immunogenicity of epitope-based DNA vaccines may be the access of epitopes to the MHCII presentation pathway to T cells, which is likely a stochastic process in the case of a vaccine without targeting technology.

[0004] U.S. Pat. No. 5,633,234 describes chimeric proteins comprising an antigenic domain of modified influenza hemagglutinin (HA) and a cytoplasmic endosomal/lysosomal targeting signal which effectively target antigens to that compartment. The antigenic domain was processed and peptides from it presented on the cell surface in association with major histocompatibility (MHC) class II molecules. The cytoplasmic tail of LAMP-1 was used to form the endosomal/lysosomal targeting domain of the chimeric protein.

[0005] U.S. Pat. No. 8,318,173 extended these initial observations to describe chimeric proteins (and the corresponding DNAs that encode these proteins) comprising the HIV-1 Gag protein inserted between the full lumenal domain and a transmembrane domain of LAMP-1. This construct was introduced into dendritic cells which were then reported to target the MHC II pathway.

[0006] This approach has proved useful in increasing cellular and humoral responses to several virus antigens, human papillomavirus E7, dengue virus membrane protein, HIV-1 gp160 membrane protein, HIV-1 p55 Gag, West Nile membrane protein, hepatitis C virus NS3 protein and cytomegalovirus pp65 (see, e.g., Bonini, et al., J. Immunol. 166: 5250-5257, 2001). The enhanced immune response can be attributed to co-localization of LAMP with MHC II and the more efficient processing and delivery of antigenic peptides. In addition, LAMP-targeting is reported to result in the presentation of an increased number of immunogenic epitopes, thus inducing a qualitatively broadened immune response compared to untargeted antigen. For example, Fernandes et al., 2000, Eur. J. Immunol. 30(8): 2333-43, demonstrated an increase in the number of presented peptides of a LAMP-trafficked OVA antigen encoded in a vaccinia vector. Of 12 peptides generated from exogenously supplied OVA, 9 were presented by an OVA/LAMP chimera, as compared to only 2 by the construct without LAMP.

[0007] While it has been determined that the cytoplasmic domain of LAMP is necessary (in conjunction with a signal sequence and transmembrane domain), it is not always sufficient for endosomal/lysosomal trafficking of all antigens. Instead, the full lumenal domain of LAMP has been shown to be also required for the trafficking of proteins to the lysosomal vesicular pathway.

[0008] However, even with the presence of the complete lumenal domain and the complete transmembrane/cytoplasmic tail of LAMP (“complete LAMP Constructs”), it has increasingly been found that the efficacy of a particular antigen to raise an immune response is highly dependent on the particular sequence used in these constructs. In fact, different antigenic fragments of the same protein when inserted into the complete LAMP constructs have been found to not elicit the same immune response. Sometimes the antigen fragment generates an immune response and other times it does not. These observations make the ability to predict ahead of time which particular antigenic sequence from a protein of interest will raise an immune response difficult with the complete LAMP Constructs.

[0009] Moreover, in generating the complete LAMP Constructs, it has been repeatedly observed that the full lumenal domain is required to properly express and process an antigen. For example, in Godinho et al., PLoS ONE 9(6): 9(6): e99887. doi:10.1371/journal.pone.0099887, the authors reported that the complete and intact lumenal domain was the necessary minimal region needed to target an antigen to the lysosomes and that fragments of the lumenal domain did not work. See, id. at page 6.

[0010] Specifically, the Godinho authors showed that by completely removing the first luminal domain and some of the second luminal domain (i.e., T1-Lum/gag construct), both protein expression and antibody response is decreased. Similarly, removing 25% of first luminal domain but having an intact second luminal domain (i e , T2-lum/gag), both protein expression and antibody response comparatively increased but still less than the results obtained with the complete LAMP construct.

[0011] Moreover, the authors acknowledged that the ability to raise an immune response is dependent upon the particular antigen and the epitopes used in these complete LAMP Constructs. For example, on page 9, column 2, the authors state “accordingly, previous studies demonstrated that DNA vaccines that generate Gag secreted as VLP, or in a soluble form, induce different levels of T and B cell activation, which were also different from the response induced by cytoplasmic Gag.” Moreover, insertion of an antigenic sequence between the full lumenal domain of LAMP and the full transmembrane/cytoplasmic domain of LAMP as has been described in the literature can result in such large polynucleotide sequences that it can become either too costly to produce at commercial levels or impractical from a scientific perspective.

[0012] Thus, there is a need to design new and improved LAMP Constructs that can be used as vaccines to effectively treat, for example, hyperproliferative disorders and/or cancer. Moreover, once improved, these new LAMP Constructs can be used to generate antibodies.

### SUMMARY OF THE INVENTION

[0013] This Summary is provided to introduce a selection of concepts in a simplified form that are further described below in the Detailed Description. This Summary is not intended to identify key or essential features of the claimed subject matter, nor is it intended to be used to limit the scope of the claimed subject matter. Other features, details, utilities, and advantages of the claimed subject matter will be apparent from the following written Detailed Description including those aspects illustrated in the accompanying drawings and defined in the appended claims.

[0014] It is an object of this invention to provide novel constructs (“improved LAMP Constructs”) comprising specific fragments and/or variants of LAMP domains that effectively present the cancer antigens specified herein to the immune system to generate an enhanced immune response. These improved LAMP Constructs effectively direct the antigens to the lysosomal/endosomal compartment where they are processed and presented to major histocompatibility complex (MHC) class II molecules so that helper T cells are preferentially stimulated and/or antibodies are generated.

[0015] The improved LAMP Constructs and methods described herein may elicit an immune response in a subject. The immune response may be an immune response to the epitopes of the antigens in the improved LAMP Construct (e.g., vaccine). Vaccines arm the immune system of the subject such that the immune system may detect and destroy that which contains the antigens of the vaccines in the subject. The improved LAMP Constructs and methods described herein may elicit a Th1 immune response in the subject. Th1 immune responses may include secretion of inflammatory cytokines (e.g., IFNγ, TNFα) by a subset of immune cells (e.g., antigen specific T-cells). In some cases, the inflammatory cytokines activate another subtype of immune cells (e.g., cytotoxic T-cells) which may destroy that which contains the antigen in the subject.

[0016] In some cases, the epitopes and/or antigens used in the improved LAMP Constructs and methods described herein may be recognized by the immune system of a subject to elicit a Th1 immune response and release Type I cytokines. The Th1 response may be initiated by the interaction between the epitope and the T-cell, more specifically, the major histocompatibility complex (MHC) expressed by the T-cell. For example, high affinity binding of an epitope to an MHC receptor may stimulate a Th1 response. MHC receptors may be at least one of a plurality of types of MHC receptors. The MHC receptors engaged on a T-cell may vary across individuals in a population.

[0017] In some cases, the immune response is a Type 1 immune response. In some cases, the immune response is characterized by a ratio of Type I cytokine production to Type II cytokine production that is greater than 1. In some cases, the immune response is characterized by a ratio of Type I cytokine production to Type II cytokine production that is less than 1. In some cases, the immune response is characterized by a ratio of IFNγ production to IL-10 production that is greater than 1. In some cases, the immune response is characterized by a ratio of IFNγ production to IL-10 production that is less than 1.

[0018] Prime boost protocols are also contemplated. For example, the invention further provides a method for generating an immune response in a subject to a cancer antigen, comprising priming the subject with an improved LAMP Construct comprising a cancer antigen as described herein followed by at least one boosting of the subject with the antigen or a related antigen (e.g., a second antigen derived from the same or highly similar protein sequence). Mixtures of antigens can be used in either or both the priming and the boosting step. Use of an improved LAMP Construct for the prime step followed by an antigen boost step has been shown to significantly produce higher titers, indicating the power of LAMP in enhancing antibody response.

[0019] It is yet another object of this invention to provide improved methods of treatment for cancer and/or hyperproliferative disorders by eliciting an anti-tumor immune response through stimulation of helper T cells.

[0020] The invention further provides a nucleic acid molecule encoding any of the improved LAMP Constructs comprising the cancer antigens described herein. The invention also provides an improved LAMP Construct comprising an antigen to generate antibodies. The improved LAMP Construct can comprise a nucleic acid wherein the nucleic acid molecule is operably linked to an expression control sequence. In one preferred aspect, the improved LAMP Construct is a vaccine vector, suitable for vaccinating a patient. In another aspect, the invention provides a delivery vehicle comprising the improved LAMP Construct for facilitating the introduction of the nucleic acid molecule encoding the antigen into a cell. The delivery vehicle may be lipid-based (e.g., a liposome formulation), viral-based (e.g., comprising viral proteins encapsulating the nucleic acid molecule), or cell-based.

[0021] In preferred embodiments, the invention provides an injectable composition comprising an improved LAMP Construct comprising a cancer antigen of interest for eliciting an immune response (e.g., generation of antibodies) in a mammal to the cancer antigen. In preferred embodiments, this vaccine generates a preferential Th1 response to a Th2 response. The improved LAMP Constructs comprise at least one epitope of a cancer antigen as described herein.

[0022] The invention also provides a cell comprising any of the improved LAMP Constructs described herein. In one aspect, the cell is an antigen presenting cell. The antigen presenting cell may be a professional antigen presenting cell (e.g., a dendritic cell, macrophage, B cell, and the like) or an engineered antigen presenting cell (e.g., a non-professional antigen presenting cell engineered to express molecules required for antigen presentation, such as MHC class II molecules). The molecules required for antigen presentation may be derived from other cells, e.g., naturally occurring, or may themselves be engineered (e.g. mutated or modified to express desired properties, such as higher or lower affinity for an antigenic epitope). In one aspect, the antigen presenting cell does not express any co-stimulatory signals and the antigen is an auto-antigen.

[0023] The invention additionally provides a kit comprising a plurality of cells comprising any of the improved LAMP Constructs described herein. At least two of the cells express different MHC class II molecules, and each cell comprises the same LAMP Construct. In one aspect, a kit is provided comprising an improved LAMP Construct and a cell for receiving the vector.

[0024] The invention also provides a transgenic animal comprising at least one of the cells and/or at least one of the improved LAMP Constructs described herein. The invention also provides a transgenic animal comprising at least one of the cells described herein.

[0025] The invention further provides a method for generating an immune response in an animal (e.g., a human or a non-human vertebrate) to an antigen, comprising: administering to the animal a cell as described above, wherein the cell expresses, or can be induced to express, the improved LAMP Construct in the animal In one aspect, the cell comprises an MHC class II molecule compatible with MHC proteins of the animal, such that the animal does not generate an immune response against the MHC class II molecule. In one preferred aspect, the animal is a human.

[0026] In one further aspect, the invention provides a method for eliciting an immune response to a cancer antigen, comprising administering to an animal, such as a human or a non-human vertebrate, any of the improved LAMP Constructs described herein. Preferably, the improved LAMP Construct is infectious for a cell of the animal For example, the improved LAMP Construct may be a viral vector, such as a vaccinia improved LAMP Construct.

[0027] For example, the invention further provides a method for generating an immune response in an animal to a cancer antigen, comprising priming the animal with an improved LAMP Construct comprising an antigen as described herein followed by at least one boosting of the animal. Use of an improved LAMP Construct for the prime step followed by an antigen boost step has been shown to significantly produce higher titers, indicating the power of LAMP in enhancing antibody response.

[0028] In a further aspect, a cell is obtained from a patient, the improved LAMP Construct described herein is introduced into the cell and the cell or progeny of the cell is reintroduced into the patient. In one aspect, the cell is a stem cell-capable of differentiating into an antigen presenting cell. Treatments of human patients as well as veterinary use are specifically contemplated.

[0029] The present invention also comprises methods of generating antibodies in a non-human vertebrate wherein the non-human vertebrate is injected with an improved LAMP Construct comprising an antigen of interest as described herein. The cancer antigen of interest is then efficiently presented to the immune system with the help of LAMP in the non-human vertebrate to raise antibodies against the antigen.

[0030] Specifically, by combining presentation of the antigen of interest with LAMP, the antigen is then effectively transported to the cytoplasmic endosomal/lysosomal compartments, where the antigen can be processed and peptides from it presented on the cell surface in association with major histocompatibility (MHC) class II molecules.

[0031] These generated antibodies can be isolated from the blood of the vertebrate (as polyclonals) and then further isolated to generate monoclonal antibodies using standard techniques.

[0032] In preferred embodiments, the genome of the non-human vertebrate comprises an introduced partially human immunoglobulin region, said introduced region comprising human immunoglobulin variable region locus coding sequences and non-coding sequences based on the endogenous immunoglobulin variable region locus of the non-human vertebrate. Preferably, non-human vertebrate's genome has at least part or all of the endogenous immunoglobulin region removed.

[0033] In further preferred embodiments, the production of human monoclonal antibodies in the non-human vertebrate requires that the host have at least one locus that will express human heavy chain immunoglobulin proteins and one locus that will express human light chain immunoglobulin proteins.

[0034] In some aspects, the partially human immunoglobulin variable region locus comprises human V_{H} coding sequences and non-coding V_{H} sequences based on the endogenous V_{H} region of the non-human vertebrate. In these aspects, the partially human immunoglobulin variable region locus further comprises human D and J gene coding sequences and non-coding D and J gene sequences based on the endogenous genome of the non-human vertebrate host.

[0035] In other aspects, the immunoglobulin region comprises an introduced region comprising human V_{L} coding sequences and non-coding V_{L} sequences based on the endogenous V_{L} region of the non-human vertebrate. More preferably, the introduced partially human immunoglobulin region comprising human V_{L} coding sequences further comprises human J gene coding sequences and non-coding J gene sequences based on the endogenous genome of the non-human vertebrate host.

[0036] In certain aspects, the vertebrate is a mammal, and preferably the mammal is a rodent, e.g., a mouse or rat. In other aspects, the vertebrate is avian, e.g., a chicken. Other non-human vertebrates include rabbits, llamas, camels, a cow, a guinea pig, a hamster, a dog, a cat, a horse, a non-human primate, a simian (e.g. a monkey or ape), a monkey (e.g. marmoset, baboon, rhesus macaque), or an ape (e.g. gorilla, chimpanzee, orangutan, gibbon).

[0037] In further embodiments, the partially human immunoglobulin region comprises human V_{H} gene coding regions, and further comprises i) human D and J gene coding sequences and ii) non-coding D and J gene and pre-DJ sequences based on the endogenous genome of the non-human vertebrate host. In other aspects, the V_{H} gene coding regions derive (at least partially) from other sources—e.g., they could be rationally or otherwise designed sequences, sequences that are a combination of human and other designed sequences, or sequences from other species, such as nonhuman primates.

[0038] In yet another specific aspect, the partially human immunoglobulin region comprises human V_{L} gene coding regions, and further comprises i) human J gene coding sequences and ii) non-coding J gene sequences based on the endogenous genome of the non-human vertebrate host. In a specific aspect, the partially human immunoglobulin region comprises human V_{H} coding regions, human D and J gene coding sequences, and non-coding D and J gene and pre-DJ sequences based on the endogenous genome of the non-human vertebrate host.

[0039] The methods described herein can be used in the production and/or optimization of antibodies, including fully human antibodies, humanized antibodies, chimeric antibodies, for diagnostic and therapeutic uses. Hybridomas producing such antibodies are also a further object of the invention.

[0040] These and other aspects, objects and features are described in more detail below.

### BRIEF DESCRIPTION OF THE FIGURES

[0041] The objects and features of the invention can be better understood with reference to the following detailed description and accompanying drawings.

[0042] FIG. 1 illustrates the general scheme of different types of improved LAMP Constructs (identified as ILC-1, ILC-2, ILC-3, ILC-4, ILC-5 and ILC-6) that can be used as described herein.

[0043] FIG. 2B illustrates the domains of the LAMP proteins defined herein while FIG. 2A defines the specific amino acid boundaries of these domains for human LAMP-1 (SEQ ID NO:1), human LAMP-2 (SEQ ID NO:2), human LAMP-3 (SEQ ID NO:3), human LIMP-2 (SEQ ID NO:4), human Endolyn (SEQ ID NO:5), human Macrosailin (SEQ ID NO:80), human LAMP-5 (SEQ ID NO:93) and human LIMBIC (SEQ ID NO:67). As described herein the LAMP lumenal domains, homology domains, transmembrane domains, the cytoplasmic tail and the signal sequences can be used to generate the improved LAMP Constructs ILC-1, ILC-2, ILC-3, ILC-4, ILC-5 and ILC-6 as described herein.

[0044] FIG. 3 provides alignment of LAMP-1 proteins found in other species as compared to human LAMP-1 (SEQ ID NO:1). The equivalent domains of these other species can be used to generate the improved LAMP Constructs described herein and are readily identifiable by comparing the domains identified for human LAMP-1 in FIG. 2 and FIG. 3 to the alignments shown in FIG. 3.

[0045] FIG. 4 provides alignment of LAMP-2 proteins found in other species as compared to human LAMP-2 (SEQ ID NO:2). The equivalent domains of these other species can be used to generate the improved LAMP Constructs described herein and are readily identifiable by comparing the domains identified for human LAMP-2 in FIG. 2 and FIG. 4 to the alignments shown in FIG. 4.

[0046] FIG. 5 provides alignment of LAMP-3 proteins found in other species as compared to human LAMP-3 (SEQ ID NO:3). The equivalent domains of these other species can be used to generate the improved LAMP Constructs described herein and are readily identifiable by comparing the domains identified for human LAMP-3 in FIG. 2 and FIG. 5 to the alignments shown in FIG. 5.

[0047] FIG. 6 provides alignment of LIMP-2 proteins found in other species as compared to human LIMP-2 (SEQ ID NO:4). The equivalent domains of these other species can be used to generate the improved LAMP Constructs described herein and are readily identifiable by comparing the domains identified for human LIMP-2 in FIG. 2 and FIG. 6 to the alignments shown in FIG. 6.

[0048] FIG. 7 provides alignment of LIMBIC proteins found in other species as compared to human LIMBIC (SEQ ID NO:67). The equivalent domains of these other species can be used to generate the improved LAMP Constructs described herein and are readily identifiable by comparing the domains identified for human LIMBIC in FIG. 2 and FIG. 7 to the alignments shown in FIG. 7.

[0049] FIG. 8 provides alignment of Endolyn proteins found in other species as compared to human Endolyn (SEQ ID NO:5). The equivalent domains of these other species can be used to generate the improved LAMP Constructs described herein and are readily identifiable by comparing the domains identified for human Endolyn in FIG. 2 and FIG. 8 to the alignments shown in FIG. 8.

[0050] FIG. 9 provides alignment of Macrosailin proteins found in other species as compared to human Macrosailin (SEQ ID NO:80). The equivalent domains of these other species can be used to generate the improved LAMP Constructs described herein and are readily identifiable by comparing the domains identified for human Macrosailin in FIG. 2 and FIG. 9 to the alignments shown in FIG. 9.

[0051] FIG. 10 provides alignment of LAMP-5 proteins found in other species as compared to human LAMP-5 (SEQ ID NO:93). The equivalent domains of these other species can be used to generate the improved LAMP Constructs described herein and are readily identifiable by comparing the domains identified for human LAMP-5 in FIG. 2 and FIG. 10 to the alignments shown in FIG. 10.

[0052] FIG. 11 shows results obtained when mice were immunized with HVEM-LAMP, HVEM, or LAMP on day 0, 7, and 14. On day 28, mice were bled and serum samples were isolated. HVEM specific IgG was examined by ELISA. Data represent geometric mean of antibody titers±geometric SD, n=6. **p value<0.01

[0053] FIG. 12 shows results obtained when mice were immunized with HVEM-LAMP, HVEM, or LAMP on day 0, 7, and 14. On day 35, mice were boosted with 5 μg HVEM protein in the presence of alum adjuvant. Mice were bled on day 49 and serum samples were isolated. HVEM specific IgG was examined by ELISA. Data represent geometric mean of antibody titers±geometric SD, n=6. ***p value<0.001; ****p value<0.0001.

[0054] FIG. 13 shows that LAMP alters the binding affinity of epitopes in CRD3/4 of HVEM.

[0055] FIG. 14 confirms protein expression of tested improved LAMP Constructs. In each of FIGS. 14-28, the labels “complete LAMP Construct”, ILC-1, ILC-2, ILC-3 and ILC-4 correspond to the constructs as depicted in FIG. 1.

[0056] FIG. 15 shows that the improved LAMP Constructs induce Th1 effector T cells producing INFγ.

[0057] FIG. 16 shows a particular improved LAMP construct (e.g., ILC-4 as shown in FIG. 1) elicited a significantly higher T cell response against all Survivin peptide pools.

[0058] FIG. 17 shows that CD4 T cells are the major source of IFNγ producing cells and that the improved LAMP Constructs demonstrate an increase in the CD4 effector memory cell population over the Complete LAMP construct.

[0059] FIG. 18 shows that the improved LAMP Constructs produced stronger Survivin-specific total IgG response in BALB/c mice.

[0060] FIGS. 19 and 20 provides the amino acid sequence of the cancer antigens that can be cloned, either singularly or in combination as described in Table 1 and paragraph [150], into the LAMP Constructs described herein and in FIGS. 1-10. Furthermore, FIG. 19 provides the amino acid sequence of Survivin-LAMP construct tested in the Examples. The signal sequence of each construct is depicted as lower case and underlined letters; the Survivin sequence is depicted in capitalized, white letters, shaded in black; the luminal domain is depicted in italics and capitalized letters and the transmembrane/cytoplasmic domain is depicted in capitalized letter and shaded in grey, and in ILC-4, the second homology domain is bolded. Additional amino acids (LE and EF) may be included as part of the cloning linkers.

[0061] FIG. 21 shows that IGFBP2 (39-328)-ILC-1 Construct induced significantly higher IFNγ producing effector T cells at the dose of 10 ug IM/EP immunization.

[0062] FIG. 22 shows that IGFBP2 (39-328)-ILC-1 Construct induced IFNγ and/or TNFα producing CD4⁺ and CD8⁺ effector memory T cells at the dose of 10 ug IM/EP immunization.

[0063] FIG. 23 shows that IGFBP-2-specific IgG production in C57BL/6 albino mice immunized with IGFBP2 (39-328)-ILC-1 Construct by IM/EP immunization.

[0064] FIG. 24 shows that IFNγ induction with both pp65 and gB peptides.

[0065] FIG. 25 shows that total IgG (left) and IgG2a (right) antibodies titers in serum of immunized mice against CMV-transfected cell lysate.

[0066] FIG. 26 shows PSMA-ILC-1 LAMP Construct induced significantly higher IFNγ producing effector T cells at the dose of 20 ug ID/EP immunization.

[0067] FIG. 27 shows PSMA-ILC-1 LAMP Construct induced IFNγ producing CD4+ and CD8+ effector memory T cells at the dose of 20 ug ID/EP immunization.

[0068] FIG. 28 shows total IgG and IgG2A production in C57BL/6 mice immunized with PSMA-ILC-1 LAMP Construct by immunization via ID/EP.

### DETAILED DESCRIPTION

[0069] The invention provides improved LAMP Constructs which can be used to generate vaccines and/or used to raise antibodies. The improved LAMP Constructs can be used to modulate or enhance an immune response. In one preferred aspect, the invention provides a method for treating a patient with cancer or a hyperproliferative disorder by providing an improved LAMP Construct comprising one or more of the cancer antigens as described herein. The improved LAMP Constructs can also be used to raise antibodies in non-human vertebrates, and in preferably, non-human mammals.

### Definitions

[0070] The following definitions are provided for specific terms which are used in the following written description.

[0071] As used in the specification and claims, the singular form “a”, “an” and “the” include plural references unless the context clearly dictates otherwise. For example, the term “a cell” includes a plurality of cells, including mixtures thereof. The term “a nucleic acid molecule” includes a plurality of nucleic acid molecules.

[0072] As used herein, the term “comprising” is intended to mean that the improved LAMP Constructs and methods include the recited elements, but do not exclude other elements. “Consisting essentially of”, when used to define improved LAMP Constructs and methods, shall mean excluding other elements of any essential significance to the combination. Thus, an improved LAMP Construct consisting essentially of the elements as defined herein would not exclude trace contaminants from the isolation and purification method and pharmaceutically acceptable carriers, such as phosphate buffered saline, preservatives, and the like. “Consisting of” shall mean excluding more than trace elements of other ingredients and substantial method steps for administering the improved LAMP Constructs of this invention. Embodiments defined by each of these transition terms are within the scope of this invention.

[0073] The term “about” or “approximately” means within an acceptable range for the particular value as determined by one of ordinary skill in the art, which will depend in part on how the value is measured or determined, e.g., the limitations of the measurement system. For example, “about” can mean a range of up to 20%, preferably up to 10%, more preferably up to 5%, and more preferably still up to 1% of a given value. Alternatively, particularly with respect to biological systems or processes, the term can mean within an order of magnitude, preferably within 5 fold, and more preferably within 2 fold, of a value. Unless otherwise stated, the term ‘about’ means within an acceptable error range for the particular value, such as ±1-20%, preferably ±1-10% and more preferably ±1-5%.

[0074] Where a range of values is provided, it is understood that each intervening value, between the upper and lower limit of that range and any other stated or intervening value in that stated range is encompassed within the invention. The upper and lower limits of these smaller ranges may independently be included in the smaller ranges, and are also encompassed within the invention, subject to any specifically excluded limit in the stated range. Where the stated range includes one or both of the limits, ranges excluding either both of those included limits are also included in the invention.

[0075] As used herein, “the lysosomal/endosomal compartment” refers to membrane-bound acidic vacuoles containing LAMP molecules in the membrane, hydrolytic enzymes that function in antigen processing, and MHC class II molecules for antigen recognition and presentation. This compartment functions as a site for degradation of foreign materials internalized from the cell surface by any of a variety of mechanisms including endocytosis, phagocytosis and pinocytosis, and of intracellular material delivered to this compartment by specialized autolytic phenomena (de Duve, Eur. J. Biochem. 137: 391, 1983). The term “endosome” as used herein and in the claims encompasses a lysosome.

[0076] As used herein, a “lysosome-related organelle” refers to any organelle which comprises lysosymes and includes, but is not limited to, MIIC, CIIV, melanosomes, secretory granules, lytic granules, platelet-dense granules, basophil granules, Birbeck granules, phagolysosomes, secretory lysosomes, and the like. Preferably, such an organelle lacks mannose 6-phosphate receptors and comprises LAMP, but may or may not comprise an MHC class II molecule. For reviews, see, e.g., Blott and Griffiths, Nature Reviews, Molecular Cell Biology, 2002; Dell'Angelica, et al., The FASEB Journal 14: 1265-1278, 2000.

[0077] As used herein, the terms “polynucleotide” and “nucleic acid molecule” are used interchangeably to refer to polymeric forms of nucleotides of any length. The polynucleotides may contain deoxyribonucleotides, ribonucleotides, and/or their analogs. Nucleotides may have any three-dimensional structure, and may perform any function, known or unknown. The term “polynucleotide” includes, for example, single-, double-stranded and triple helical molecules, a gene or gene fragment, exons, introns, mRNA, tRNA, rRNA, ribozymes, antisense molecules, cDNA, recombinant polynucleotides, branched polynucleotides, aptamers, plasmids, vectors, isolated DNA of any sequence, isolated RNA of any sequence, nucleic acid probes, and primers. A nucleic acid molecule may also comprise modified nucleic acid molecules (e.g., comprising modified bases, sugars, and/or internucleotide linkers).

[0078] As used herein, the term “peptide” refers to a compound of two or more subunit amino acids, amino acid analogs, or peptidomimetics. The subunits may be linked by peptide bonds or by other bonds (e.g., as esters, ethers, and the like).

[0079] As used herein, the term “amino acid” refers to either natural and/or unnatural or synthetic amino acids, including glycine and both D or L optical isomers, and amino acid analogs and peptidomimetics. A peptide of three or more amino acids is commonly called an oligopeptide if the peptide chain is short. If the peptide chain is long (e.g., greater than about 10 amino acids), the peptide is commonly called a polypeptide or a protein. While the term “protein” encompasses the term “polypeptide”, a “polypeptide” may be a less than full-length protein.

[0080] As used herein a “LAMP polypeptide” refers to the mammalian lysosomal associated membrane proteins human LAMP-1, human LAMP-2, human LAMP-3, human LIMP-2, human Endolyn, human LIMBIC, human LAMP-5, or human Macrosailin as described herein, as well as orthologs (such as, for example, the LAMP proteins shown in FIGS. 3-10), and allelic variants.

[0081] As used herein, “expression” refers to the process by which polynucleotides are transcribed into mRNA and/or translated into peptides, polypeptides, or proteins. If the polynucleotide is derived from genomic DNA, expression may include splicing of the mRNA transcribed from the genomic DNA.

[0082] As used herein, “under transcriptional control” or “operably linked” refers to expression (e.g., transcription or translation) of a polynucleotide sequence which is controlled by an appropriate juxtaposition of an expression control element and a coding sequence. In one aspect, a DNA sequence is “operatively linked” to an expression control sequence when the expression control sequence controls and regulates the transcription of that DNA sequence.

[0083] As used herein, “coding sequence” is a sequence which is transcribed and translated into a polypeptide when placed under the control of appropriate expression control sequences. The boundaries of a coding sequence are determined by a start codon at the 5′ (amino) terminus and a translation stop codon at the 3′ (carboxyl) terminus. A coding sequence can include, but is not limited to, a prokaryotic sequence, cDNA from eukaryotic mRNA, a genomic DNA sequence from eukaryotic (e g , mammalian) DNA, and even synthetic DNA sequences. A polyadenylation signal and transcription termination sequence will usually be located 3′ to the coding sequence.

[0084] As used herein, two coding sequences “correspond” to each other if the sequences or their complementary sequences encode the same amino acid sequences.

[0085] As used herein, “signal sequence” denotes the endoplasmic reticulum translocation sequence. This sequence encodes a signal peptide that communicates to a cell to direct a polypeptide to which it is linked (e.g., via a chemical bond) to an endoplasmic reticulum vesicular compartment, to enter an exocytic/endocytic organelle, to be delivered either to a cellular vesicular compartment, the cell surface or to secrete the polypeptide. This signal sequence is sometimes clipped off by the cell in the maturation of a protein. Signal sequences can be found associated with a variety of proteins native to prokaryotes and eukaryotes.

[0086] As used herein, “trafficking” denotes movement or progression of the polypeptide encoded by the improved LAMP Construct through cellular organelles or compartments in the pathway from the rough endoplasmic reticulum to the endosomal/lysosomal compartment or related organelles where antigen processing and binding to MHC II occurs.

[0087] As used herein, an “improved LAMP Construct” and an “improved LAMP Construct comprising an antigen” and an “improved LAMP Construct comprising an antigen of interest” are used interchangeably. The different arrangements of the improved LAMP Constructs are illustrated in FIG. 1 as ILC1-ILC6. Moreover, the use of an “improved LAMP Construct” encompasses both the polynucleotide sequence of the improved LAMP Construct as well as the protein encoded by the polynucleotide sequence of the improved LAMP Construct.

[0088] As used herein, an “improved LAMP Construct delivery vehicle” is defined as any molecule or group of molecules or macromolecules that can carry an improved LAMP Construct into a host cell (e.g., such as genes or gene fragments, antisense molecules, ribozymes, aptamers, and the like) and which occurs in association with an improved LAMP Construct as described herein.

[0089] As used herein, “improved LAMP Construct delivery,” or “improved LAMP Construct transfer,” refers to the introduction of the improved LAMP Construct into a host cell, irrespective of the method used for the introduction. The introduced improved LAMP Constructs may be stably or transiently maintained in the host cell. Stable maintenance typically requires that the introduced improved LAMP Construct either contains an origin of replication compatible with the host cell or integrates into a replicon of the host cell such as an extrachromosomal replicon (e.g., a plasmid) or a nuclear or mitochondrial chromosome.

[0090] As used herein, a “viral improved LAMP Construct” refers to a virus or viral particle that comprises the improved LAMP Construct to be delivered into a host cell, either in vivo, ex vivo or in vitro. Examples of viral improved LAMP Constructs include, but are not limited to, adenovirus vectors, adeno-associated virus vectors, retroviral vectors, and the like. In aspects where gene transfer is mediated by an adenoviral vector, an improved LAMP Construct includes the adenovirus genome or part thereof, and a selected, non-adenoviral gene, in association with adenoviral capsid proteins.

[0091] As used herein, “adenoviral-mediated gene transfer” or “adenoviral transduction” refers to the process by which an improved LAMP Construct is transferred into a host cell by virtue of the adenovirus entering the cell. Preferably, the improved LAMP Construct is able to replicate and/or integrate and be transcribed within the cell.

[0092] As used herein, “adenovirus particles” are individual adenovirus virions comprised of an external capsid and an improved LAMP Construct, where the capsid is further comprised of adenovirus envelope proteins. The adenovirus envelope proteins may be modified to comprise a fusion polypeptide which contains a polypeptide ligand covalently attached to the viral protein, e.g., for targeting the adenoviral particle to a particular cell and/or tissue type.

[0093] As used herein, the term “administering” or “immunizing” or “injecting” an improved LAMP Construct refers to transducing, transfecting, microinjecting, electroporating, or shooting the cell with the improved LAMP Construct. In some aspects, improved LAMP Constructs are introduced into a target cell by contacting the target cell with a delivery cell (e.g., by cell fusion or by lysing the delivery cell when it is in proximity to the target cell).

[0094] As used herein, the phrase “prime boost” describes the use of an improved LAMP Construct described herein used to prime a T-cell response followed by the use of a second improved LAMP Construct comprising an antigen, a DNA vaccine comprising an antigen or a recombinant antigen to boost the response (or visa versa). These heterologous prime-boost immunizations elicit immune responses of greater height and breadth than can be achieved by priming and boosting with the same vector. The priming with an improved LAMP Construct comprising an antigen initiates memory cells; the boost step expands the memory response. Preferably, two different agents that do not raise responses against each other are used and thus do not interfere with each other's activity. Mixtures of antigens are specifically contemplated in the prime and/or boost step. Boosting can occur once or multiple times.

[0095] As used herein, “hybridization” refers to a reaction in which one or more polynucleotides react to form a complex that is stabilized via hydrogen bonding between the bases of the nucleotide residues. The hydrogen bonding may occur by Watson-Crick base pairing, Hoogstein binding, or in any other sequence-specific manner. The complex may comprise two strands forming a duplex structure, three or more strands forming a multi-stranded complex, a single self-hybridizing strand, or any combination of these. A hybridization reaction may constitute a step in a more extensive process, such as the initiation of a PCR reaction, or the enzymatic cleavage of a polynucleotide by a ribozyme.

[0096] As used herein, a polynucleotide or polynucleotide region (or a polypeptide or polypeptide region) which has a certain percentage (for example, at least about 50%, at least about 60%, at least about 70%, at least about 80%, at least about 85%, at least about 90%, at least about 95%, at least about 99%) of “sequence identity” to another sequence means that, when maximally aligned, using software programs routine in the art, that percentage of bases (or amino acids) are the same in comparing the two sequences.

[0097] Two sequences are “substantially homologous” or “substantially similar” when at least about 50%, at least about 60%, at least about 70%, at least about 75%, and preferably at least about 80%, and most preferably at least about 90 or 95% of the nucleotides match over the defined length of the DNA sequences. Similarly, two polypeptide sequences are “substantially homologous” or “substantially similar” when at least about 50%, at least about 60%, at least about 66%, at least about 70%, at least about 75%, and preferably at least about 80%, and most preferably at least about 90 or 95% of the amino acid residues of the polypeptide match over a defined length of the polypeptide sequence. Sequences that are substantially homologous can be identified by comparing the sequences using standard software available in sequence data banks. Substantially homologous nucleic acid sequences also can be identified in a Southern hybridization experiment under, for example, stringent conditions as defined for that particular system. Defining appropriate hybridization conditions is within the skill of the art. For example, stringent conditions can be: hybridization at 5×SSC and 50% formamide at 42° C., and washing at 0.1×SSC and 0.1% sodium dodecyl sulfate at 60° C. Further examples of stringent hybridization conditions include: incubation temperatures of about 25 degrees C. to about 37 degrees C.; hybridization buffer concentrations of about 6×SSC to about 10×SSC; formamide concentrations of about 0% to about 25%; and wash solutions of about 6×SSC. Examples of moderate hybridization conditions include: incubation temperatures of about 40 degrees C. to about 50 degrees C.; buffer concentrations of about 9×SSC to about 2×SSC; formamide concentrations of about 30% to about 50%; and wash solutions of about 5×SSC to about 2×SSC. Examples of high stringency conditions include: incubation temperatures of about 55 degrees C. to about 68 degrees C.; buffer concentrations of about 1×SSC to about 0.1×SSC; formamide concentrations of about 55% to about 75%; and wash solutions of about 1×SSC, 0.1×SSC, or deionized water. In general, hybridization incubation times are from 5 minutes to 24 hours, with 1, 2, or more washing steps, and wash incubation times are about 1, 2, or 15 minutes. SSC is 0.15 M NaCl and 15 mM citrate buffer. It is understood that equivalents of SSC using other buffer systems can be employed. Similarity can be verified by sequencing, but preferably, is also or alternatively, verified by function (e.g., ability to traffic to an endosomal compartment, and the like), using assays suitable for the particular domain in question.

[0098] The terms “percent (%) sequence similarity”, “percent (%) sequence identity”, and the like, generally refer to the degree of identity or correspondence between different nucleotide sequences of nucleic acid molecules or amino acid sequences of polypeptides that may or may not share a common evolutionary origin (see Reeck et al., supra). Sequence identity can be determined using any of a number of publicly available sequence comparison algorithms, such as BLAST, FASTA, DNA Strider, GCG (Genetics Computer Group, Program Manual for the GCG Package, Version 7, Madison, Wis.), etc.

[0099] To determine the percent identity between two amino acid sequences or two nucleic acid molecules, the sequences are aligned for optimal comparison purposes. The percent identity between the two sequences is a function of the number of identical positions shared by the sequences (i.e., percent identity=number of identical positions/total number of positions (e.g., overlapping positions)×100). In one embodiment, the two sequences are, or are about, of the same length. The percent identity between two sequences can be determined using techniques similar to those described below, with or without allowing gaps. In calculating percent sequence identity, typically exact matches are counted.

[0100] The determination of percent identity between two sequences can be accomplished using a mathematical algorithm. A non-limiting example of a mathematical algorithm utilized for the comparison of two sequences is the algorithm of Karlin and Altschul, Proc. Natl. Acad. Sci. USA 1990, 87:2264, modified as in Karlin and Altschul, Proc. Natl. Acad. Sci. USA 1993, 90:5873-5877. Such an algorithm is incorporated into the NBLAST and XBLAST programs of Altschul et al, J. Mol. Biol. 1990; 215: 403. BLAST nucleotide searches can be performed with the NBLAST program, score=100, wordlength=12, to obtain nucleotide sequences homologous to sequences of the invention. BLAST protein searches can be performed with the XBLAST program, score=50, wordlength=3, to obtain amino acid sequences homologous to protein sequences of the invention. To obtain gapped alignments for comparison purposes, Gapped BLAST can be utilized as described in Altschul et al, Nucleic Acids Res. 1997, 25:3389. Alternatively, PSI-Blast can be used to perform an iterated search that detects distant relationship between molecules. See Altschul et al. (1997) supra. When utilizing BLAST, Gapped BLAST, and PSI-Blast programs, the default parameters of the respective programs (e.g., XBLAST and NBLAST) can be used. See ncbi.nlm nih.gov/BLAST/ on the WorldWideWeb.

[0101] Another non-limiting example of a mathematical algorithm utilized for the comparison of sequences is the algorithm of Myers and Miller, CABIOS 1988; 4: 1 1-17. Such an algorithm is incorporated into the ALIGN program (version 2.0), which is part of the GCG sequence alignment software package. When utilizing the ALIGN program for comparing amino acid sequences, a PAM120 weight residue table, a gap length penalty of 12, and a gap penalty of 4 can be used.

[0102] In a preferred embodiment, the percent identity between two amino acid sequences is determined using the algorithm of Needleman and Wunsch (J. Mol. Biol. 1970, 48:444-453), which has been incorporated into the GAP program in the GCG software package (Accelrys, Burlington, Mass.; available at accelrys.com on the WorldWideWeb), using either a Blossum 62 matrix or a PAM250 matrix, a gap weight of 16, 14, 12, 10, 8, 6, or 4, and a length weight of 1, 2, 3, 4, 5, or 6. In yet another preferred embodiment, the percent identity between two nucleotide sequences is determined using the GAP program in the GCG software package using a NWSgapdna.CMP matrix, a gap weight of 40, 50, 60, 70, or 80, and a length weight of 1, 2, 3, 4, 5, or 6. A particularly preferred set of parameters (and the one that can be used if the practitioner is uncertain about what parameters should be applied to determine if a molecule is a sequence identity or homology limitation of the invention) is using a Blossum 62 scoring matrix with a gap open penalty of 12, a gap extend penalty of 4, and a frameshift gap penalty of 5.

[0103] Another non-limiting example of how percent identity can be determined is by using software programs such as those described in Current Protocols In Molecular Biology (F. M. Ausubel et al., eds., 1987) Supplement 30, section 7.7.18, Table 7.7.1. Preferably, default parameters are used for alignment. A preferred alignment program is BLAST, using default parameters. In particular, preferred programs are BLASTN and BLASTP, using the following default parameters: Genetic code=standard; filter=none; strand=both; cutoff=60; expect=10; Matrix=BLOSUM62; Descriptions=50 sequences; sort by=HIGH SCORE; Databases=non-redundant, GenBank+EMBL+DDBJ+PDB+GenBank CDS translations+SwissProtein+SPupdate+PIR. Details of these programs can be found at the following Internet address: http://www.ncbi.nlm.nih.gov/cgi-bin/BLAST.

[0104] Statistical analysis of the properties described herein may be carried out by standard tests, for example, t-tests, ANOVA, or Chi squared tests. Typically, statistical significance will be measured to a level of p=0.05 (5%), more preferably p=0.01, p=0.001, p=0.0001, p=0.000001

[0105] “Conservatively modified variants” of domain sequences also can be provided. With respect to particular nucleic acid sequences, conservatively modified variants refer to those nucleic acids which encode identical or essentially identical amino acid sequences, or where the nucleic acid does not encode an amino acid sequence, to essentially identical sequences. Specifically, degenerate codon substitutions can be achieved by generating sequences in which the third position of one or more selected (or all) codons is substituted with mixed-base and/or deoxyinosine residues (Batzer, et al., 1991, Nucleic Acid Res. 19: 5081; Ohtsuka, et al., 1985, J. Biol. Chem. 260: 2605-2608; Rossolini et al., 1994, Mol. Cell. Probes 8: 91-98).

[0106] The term “biologically active fragment”, “biologically active form”, “biologically active equivalent” of and “functional derivative” of a wild-type protein, possesses a biological activity that is at least substantially equal (e.g., not significantly different from) the biological activity of the wild type protein as measured using an assay suitable for detecting the activity.

[0107] As used herein, “in vivo” nucleic acid delivery, nucleic acid transfer, nucleic acid therapy” and the like, refer to the introduction of an improved LAMP Construct directly into the body of an organism, such as a human or non-human mammal, whereby the improved LAMP Construct is introduced to a cell of such organism in vivo.

[0108] As used herein, the term “in situ” refers to a type of in vivo nucleic acid delivery in which the improved LAMP Construct is brought into proximity with a target cell (e.g., the nucleic acid is not administered systemically). For example, in situ delivery methods include, but are not limited to, injecting an improved LAMP Construct directly at a site (e.g., into a tissue, such as a tumor or heart muscle), contacting the improved LAMP Construct with cell(s) or tissue through an open surgical field, or delivering the improved LAMP Constructs to a site using a medical access device such as a catheter.

[0109] As used herein, the term “isolated” or “purified” means separated (or substantially free) from constituents, cellular and otherwise, in which the polynucleotide, peptide, polypeptide, protein, antibody, or fragments thereof, are normally associated with in nature. For example, with respect to an improved LAMP Construct, an isolated polynucleotide is one that is separated from the 5′ and 3′ sequences with which it is normally associated in the chromosome. As is apparent to those of skill in the art, a non-naturally occurring polynucleotide, peptide, polypeptide, protein, antibody, or fragments thereof, does not require “isolation” to distinguish it from its naturally occurring counterpart. By substantially free or substantially purified, it is meant at least 50% of the population, preferably at least 70%, more preferably at least 80%, and even more preferably at least 90%, are free of the components with which they are associated in nature.

[0110] As used herein, a “target cell” or “recipient cell” refers to an individual cell or cell which is desired to be, or has been, a recipient of the improved LAMP Constructs described herein. The term is also intended to include progeny of a single cell, and the progeny may not necessarily be completely identical (in morphology or in genomic or total DNA complement) to the original parent cell due to natural, accidental, or deliberate mutation. A target cell may be in contact with other cells (e.g., as in a tissue) or may be found circulating within the body of an organism.

[0111] As used herein, a “subject” is a vertebrate, preferably a mammal, more preferably a human. Mammals include, but are not limited to, murines, simians, humans, farm animals, sport animals, and pets. In other preferred embodiments, the “subject” is a rodent (e.g. a rat, a mouse, a rabbit, a llama, camels, a cow, a guinea pig, a hamster, a dog, a cat, a horse, a non-human primate, a simian (e.g. a monkey or ape), a monkey (e.g. marmoset, baboon, rhesus macaque), or an ape (e.g. gorilla, chimpanzee, orangutan, gibbon). In other embodiments, non-human mammals, especially mammals that are conventionally used as models for demonstrating therapeutic efficacy in humans (e.g. murine, primate, porcine, canine, or rabbit animals) may be employed.

[0112] The terms “cancer,” “neoplasm,” and “tumor,” are used interchangeably and in either the singular or plural form, refer to cells that have undergone a malignant transformation that makes them pathological to the host organism. Primary cancer cells transformation that makes them pathological to the host organism. Primary cancer cells (that is, cells obtained from near the site of malignant transformation) can be readily distinguished from non-cancerous cells by well-established techniques, particularly histological examination. The definition of a cancer cell, as used herein, includes not only a primary cancer cell, but any cell derived from a cancer cell ancestor. This includes metastasized cancer cells, and in vitro cultures and cell lines derived from cancer cells. When referring to a type of cancer that normally manifests as a solid tumor, a “clinically detectable” tumor is one that is detectable on the basis of tumor mass, e.g., by procedures such as CAT scan, MR imaging, X-ray, ultrasound or palpation, and/or which is detectable because of the expression of one or more cancer-specific antigens in a sample obtainable from a patient.

[0113] In preferred embodiments, the cancer (including all stages of progression, including hyperplasia) is an adenocarcinoma, sarcoma, skin cancer, melanoma, bladder cancer, brain cancer (including glioblastoma multiforme), breast cancer, uterine cancer, ovarian cancer, prostate cancer, lung cancer (including, but not limited to NSCLC, SCLC, squamous cell cancer), colorectal cancer, anal cancer, rectal cancer, cervical cancer, liver cancer, head and neck cancer, oral cancer, salivary gland cancer, esophageal cancer, pancreas cancer, pancreatic ductal adenocarcinoma (PDA), renal cancer, stomach cancer, kidney cancer, multiple myeloma or cerebral cancer. Also, preferred diseases to be treated with the LAMP Constructs described herein include those hyperproliferative disorders or cancer caused by cytomegalovirus (CMV).

[0114] As used herein, the term “pharmaceutically acceptable carrier” encompasses any of the standard pharmaceutical carriers, such as a phosphate buffered saline solution, water, and emulsions, such as an oil/water or water/oil emulsion, and various types of wetting agents. Compositions comprising the improved LAMP Constructs also can include stabilizers and preservatives. For examples of carriers, stabilizers and adjuvants, see Martin Remington's Pharm. Sci., 15th Ed. (Mack Publ. Co., Easton (1975)).

[0115] A cell has been “transformed”, “transduced”, or “transfected” by the improved LAMP Constructs when such nucleic acids have been introduced inside the cell. Transforming DNA may or may not be integrated (covalently linked) with chromosomal DNA making up the genome of the cell. In prokaryotes, yeast, and mammalian cells for example, the improved LAMP Constructs may be maintained on an episomal element, such as a plasmid. In a eukaryotic cell, a stably transformed cell is one in which the improved LAMP Constructs have become integrated into a chromosome so that it is inherited by daughter cells through chromosome replication. This stability is demonstrated by the ability of the eukaryotic cell to establish cell lines or clones comprised of a population of daughter cells containing the improved LAMP Constructs. A “clone” is a population of cells derived from a single cell or common ancestor by mitosis. A “cell line” is a clone of a primary cell that is capable of stable growth in vitro for many generations (e.g., at least about 10).

[0116] As used herein, an “effective amount” is an amount sufficient to affect beneficial or desired results, e.g., such as an effective amount of the improved LAMP Construct transfer and/or expression, and/or the attainment of a desired therapeutic endpoint. An effective amount can be administered in one or more administrations, applications or dosages. In one aspect, an effective amount of an improved LAMP Construct is an amount sufficient to transform/transduce/transfect at least one cell in a population of cells comprising at least two cells.

[0117] As used herein, a “therapeutically effective amount” is used herein to mean an amount sufficient to prevent, correct and/or normalize an abnormal physiological response. In one aspect, a “therapeutically effective amount” is an amount sufficient to reduce by at least about 30 percent, more preferably by at least 50 percent, most preferably by at least 90 percent, a clinically significant feature of pathology, such as for example, size of a tumor mass, antibody production, cytokine production, fever or white cell count, etc.

[0118] An “antibody” is any immunoglobulin, including antibodies and fragments thereof, that binds a specific antigen. The term encompasses polyclonal, monoclonal, and chimeric antibodies (e.g., bispecific antibodies). An “antibody combining site” is that structural portion of an antibody molecule comprised of heavy and light chain variable and hypervariable regions that specifically binds antigen. Exemplary antibody molecules are intact immunoglobulin molecules, substantially intact immunoglobulin molecules, and those portions of an immunoglobulin molecule that contains the paratope, including Fab, Fab′, F(ab′)₂ and F(v) portions, which portions are preferred for use in the therapeutic methods described herein. Thus, the term antibody encompasses not only whole antibody molecules, but also antibody fragments as well as variants (including derivatives such as fusion proteins) of antibodies and antibody fragments. Examples of molecules which are described by the term “antibody” in this application include, but are not limited to: single chain Fvs (scFvs), Fab fragments, Fab′ fragments, F(ab′)₂, disulfide linked Fvs (sdFvs), Fvs, and fragments comprising or alternatively consisting of, either a VL or a VH domain. The term “single chain Fv” or “scFv” as used herein refers to a polypeptide comprising a VL domain of an antibody linked to a VH domain of an antibody. See Carter (2006) Nature Rev. Immunol. 6:243.

[0119] Additionally, antibodies of the invention include, but are not limited to, monoclonal, multi-specific, bi-specific, human, humanized, mouse, or chimeric antibodies, single chain antibodies, camelid antibodies, Fab fragments, F(ab′) fragments, anti-idiotypic (anti-Id) antibodies (including, e.g., anti-Id antibodies to antibodies of the invention), domain antibodies and epitope-binding fragments of any of the above. The immunoglobulin molecules of the invention can be of any type (e.g., IgG, IgE, IgM, IgD, IgA and IgY), class (e.g., IgG1, IgG2, IgG3, IgG4, IgA1 and IgA2) or subclass of immunoglobulin molecule.

[0120] Most preferably, the antibodies are human antibodies. As used herein, “human” antibodies include antibodies having the amino acid sequence of a human immunoglobulin and include antibodies isolated from human immunoglobulin libraries and xenomice or other organisms that have been genetically engineered to produce human antibodies. The improved LAMP Constructs described herein can be used in combination with known techniques for generating human antibodies and human monoclonal antibodies as described in the exemplified protocols, see, e.g., PCT publications WO 98/24893; WO 92/01047; WO 96/34096; WO 96/33735; European Patent No. 0598877; U.S. Pat. Nos. 5,413,923; 5,625,126; 5,633,425; 5,569,825; 5,661,016; 5,545,806; 5,814,318; 5,885,793; 5,916,771; and 5,939,598; and Lonberg and Huszar, Int. Rev. Immunol. 13:65-93 (1995).

[0121] Human antibodies or “humanized” chimeric monoclonal antibodies can be produced using the improved LAMP Constructs in combination with techniques described herein or otherwise known in the art. For example, standard methods for producing chimeric antibodies are known in the art. See, for review the following references: Morrison, Science 229:1202 (1985); Oi et al., BioTechniques 4:214 (1986); Cabilly et al., U.S. Pat. No. 4,816,567; Taniguchi et al., EP 171496; Morrison et al., EP 173494; Neuberger et al., WO 8601533; Robinson et al., WO 8702671; Boulianne et al., Nature 312:643 (1984); Neuberger et al., Nature 314:268 (1985).

[0122] The antibodies of the present invention may be monovalent, bivalent, trivalent or multivalent. For example, monovalent scFvs can be multimerized either chemically or by association with another protein or substance. A scFv that is fused to a hexahistidine tag or a Flag tag can be multimerized using Ni-NTA agarose (Qiagen) or using anti-Flag antibodies (Stratagene, Inc.). Additionally, the improved LAMP Constructs can be used to generate monospecific, bispecific, trispecific or of greater multispecificity for the encoded antigen(s) contained in the improved LAMP Construct. See, e.g., PCT publications WO 93/17715; WO 92/08802; WO 91/00360; WO 92/05793; Tutt, et al., J. Immunol. 147:60-69 (1991); U.S. Pat. Nos. 4,474,893; 4,714,681; 4,925,648; 5,573,920; 5,601,819; Kostelny et.al., J. Immunol. 148:1547-1553 (1992).

[0123] An “epitope” is a structure, usually made up of a short peptide sequence or oligosaccharide, that is specifically recognized or specifically bound by a component of the immune system. T-cell epitopes have generally been shown to be linear oligopeptides. Two epitopes correspond to each other if they can be specifically bound by the same antibody. Two epitopes correspond to each other if both are capable of binding to the same B cell receptor or to the same T cell receptor, and binding of one antibody to its epitope substantially prevents binding by the other epitope (e.g., less than about 30%, preferably, less than about 20%, and more preferably, less than about 10%, 5%, 1%, or about 0.1% of the other epitope binds). In the present invention, multiple epitopes can make up an antigen.

[0124] The term “antigen” or “antigen of interest” as used herein covers any polypeptide sequence encoded by a polynucleotide sequence cloned into the improved LAMP Construct which is used to elicit an innate or adaptive immune response as shown in Table 1. An “antigen” encompasses both a single antigen as well as multiple antigenic sequences (derived from the same or different proteins) cloned into the improved LAMP Construct.

[0125] The term “antigen presenting cell” as used herein includes any cell which presents on its surface an antigen in association with a major histocompatibility complex molecule, or portion thereof, or, alternatively, one or more non-classical MHC molecules, or a portion thereof. Examples of suitable APCs are discussed in detail below and include, but are not limited to, whole cells such as macrophages, dendritic cells, B cells, hybrid APCs, and foster antigen presenting cells.

[0126] As used herein an “engineered antigen-presenting cell” refers to an antigen-presenting cell that has a non-natural molecular moiety on its surface. For example, such a cell may not naturally have a costimulator on its surface or may have an additional artificial costimulator in addition to a natural costimulator on its surface, or may express a non-natural class II molecule on its surface. In preferred embodiments, the engineered antigen-presenting cell has the antigen expressed from the improved LAMP Construct on its surface.

[0127] As used herein, “immune effector cells” refers to cells capable of binding an antigen and which mediate an immune response. These cells include, but are not limited to, T cells, B cells, monocytes, macrophages, NK cells and cytotoxic T lymphocytes (CTLs), for example CTL lines, CTL clones, and CTLs from tumor, inflammatory, or other infiltrates.

[0128] As used herein, “partially human” refers to a nucleic acid having sequences from both a human and a non-human vertebrate. In the context of partially human sequences, the partially human nucleic acids have sequences of human immunoglobulin coding regions and sequences based on the non-coding sequences of the endogenous immunoglobulin region of the non-human vertebrate. The term “based on” when used with reference to endogenous non-coding sequences from a non-human vertebrate refers to sequences that correspond to the non-coding sequence and share a relatively high degree of homology with the non-coding sequences of the endogenous loci of the host vertebrate, e.g., the non-human vertebrate from which the ES cell is derived. Preferably, the non-coding sequences share at least an 80%, more preferably 90% homology with the corresponding non-coding sequences found in the endogenous loci of the non-human vertebrate host cell into which a partially human molecule comprising the non-coding sequences has been introduced.

[0129] The term “immunoglobulin variable region” as used herein refers to a nucleotide sequence that encodes all or a portion of a variable region of an antibody molecule or all or a portion of a regulatory nucleotide sequence that controls expression of an antibody molecule Immunoglobulin regions for heavy chains may include but are not limited to all or a portion of the V, D, J, and switch regions, including introns. Immunoglobulin region for light chains may include but are not limited to the V and J regions, their upstream flanking sequences, introns, associated with or adjacent to the light chain constant region gene.

[0130] By “transgenic animal” is meant a non-human animal, usually a mammal, having an exogenous nucleic acid sequence present as an extrachromosomal element in a portion of its cells or stably integrated into its germ line DNA (i.e., in the genomic sequence of most or all of its cells). In generating a transgenic animal comprising human sequences, a partially human nucleic acid is introduced into the germ line of such transgenic animals by genetic manipulation of, for example, embryos or embryonic stem cells of the host animal according to methods well known in the art.

[0131] A “vector” includes plasmids and viruses and any DNA or RNA molecule, whether self-replicating or not, which can be used to transform or transfect a cell.

[0132] An “isolated” or “purified” population of cells is substantially free of cells and materials with which it is associated in nature. By substantially free or substantially purified APCs it is meant at least 50% of the population are APCs, preferably at least 70%, more preferably at least 80%, and even more preferably at least 90%, are free of non-APCs cells with which they are associated in nature.

[0133] As used herein, a “genetic modification” refers to any addition, deletion or disruption to a cell's normal nucleotides. Any method which can achieve the genetic modification of APCs are within the spirit and scope of this invention. Art recognized methods include viral mediated gene transfer, liposome mediated transfer, transformation, transfection and transduction, e.g., viral-mediated gene transfer such as the use of the improved LAMP Constructs based on DNA viruses such as adenovirus, adeno-associated virus and herpes virus, as well as retroviral based vectors.

[0134] The practice of the present invention employs, unless otherwise indicated, conventional molecular biology, microbiology, and recombinant DNA techniques within the skill of the art. Such techniques are explained fully in the literature. See, e.g., Maniatis, Fritsch & Sambrook, In Molecular Cloning: A Laboratory Manual (1982); DNA Cloning: A Practical Approach, Volumes I and II (D. N. Glover, ed., 1985); Oligonucleotide Synthesis (M. J. Gait, ed., 1984); Nucleic Acid Hybridization (B. D. Hames & S. J. Higgins, eds., 1985); Transcription and Translation (B. D. Hames & S. I. Higgins, eds., 1984); Animal Cell Culture (R. I. Freshney, ed., 1986); Immobilized Cells and Enzymes (IRL Press, 1986); B. Perbal, A Practical Guide to Molecular Cloning (1984).

[0135] Unless defined otherwise, all technical and scientific terms used herein have the same meaning as commonly understood by one of ordinary skill in the art to which this invention belongs. All publications mentioned herein are incorporated by reference for the purpose of describing and disclosing devices, formulations and methodologies that may be used in connection with the presently described invention

### LAMP Constructs

[0136] LAMP-1, as deduced from a cDNA clone (Chen, et al., J. Biol. Chem. 263: 8754, 1988) consists of a polypeptide core of about 382 amino acids with a large (346-residue) lumenal amino-terminal domain followed by a 24-residue hydrophobic transmembrane region and short (12-residue) carboxyl-terminal cytoplasmic tail. See, FIGS. 2A and 2B. The lumenal domain is highly glycosylated, being substituted with about 20 asparagine linked complex-type oligosaccharides and consists of two approximately 160-residue “homology domains” that are separated by a proline/serine-rich hinge region. Each of these “homology domains” contains 4 uniformly spaced cysteine residues, disulfide bonded to form four 36-38-residue loops symmetrically placed within the two halves of the lumenal domain (Arterburn, et al., J. Biol. Chem. 265: 7419, 1990; see, also Chen, et al., J. Biol. Chem. 25: 263(18): 8754-8, 1988). FIG. 2A schematically shows the conserved domains between LAMP-1, LAMP-2, LAMP-3, Endolyn, LIMBIC, LAMPS, or Macrosailin.

[0137] Previously reported LAMP constructs comprise the following elements in this specific arrangement: (a) a full lumenal domain of LAMP-1 protein, the antigen and then the full transmembrane/cytoplasmic tail of LAMP-1 protein; or (b) the antigen and the full transmembrane/cytoplasmic tail of a LAMP-1 protein. In example (a), the antigenic sequence is inserted in between the full lumenal domain of a LAMP-1 protein and the LAMP-1 full transmembrane domain/cytoplasmic tail. Both constructs have been shown to successfully target an antigenic sequence to the lysosome/endosome and will be referred to as “complete LAMP Constructs” as shown in FIG. 1 as compared to the improved LAMP Constructs ILC1-ILC6 described herein. The improved LAMP Constructs described herein do not include the complete LAMP Constructs described in the prior art.

[0138] Although it has been widely reported in the literature that fragments smaller than the full lumenal domain of LAMP-1 were not effective in generating a robust immune response (see, e.g. Godinho et al.). In contrast, the inventors unexpectedly discovered that specific fragments, in certain arrangements, did in fact effectively present antigens to the immune system, generating in many cases a more robust immune response, including the generation of a different repertoire of antibodies. For example, the inventors have identified that the minimal LAMP lumenal domain fragment that is effective for generating a robust immune response is not the full lumenal domain (as widely reported in the literature) but rather a single Homology Domain of the Lumenal Domain of a LAMP Protein.

[0139] For example, constructs can comprise, not the full lumenal domain, but instead a single Homology Domain of the Lumenal Domain of a LAMP Protein. As used herein, the “Homology Domain” comprises at least the 4 uniformly spaced cysteine residues shown in FIGS. 3-10. These cysteine resides are labeled 1, 2, 3, and 4 (and in LIMP-2 and Macrosailin—five cysteines are identified, LIMBIC—six cysteines are identified and Endolyn—eight cysteines are identified) in each Homology Domain as shown in FIGS. 3-10 and are defined herein as the “Cysteine Conserved Fragment.” Additional amino acids can be included to either the N-terminus end and/or the C-terminus end of the Cysteine Conserved Fragment to generate, up to and including a full Homology Domain of a LAMP protein. These additional added amino acids can be derived from the Homology Domain from which the Cysteine Conserved Fragment is derived or from other LAMP Protein Homology Domains. Thus, as used herein, a LAMP Homology Domain comprises and/or consists of one Cysteine Conserved Fragment. At least two LAMP Homology Domains make up the Lumenal Domain of LAMP-1, LAMP-2, LAMP-3, or Endolyn.

[0140] Specifically, in one preferred embodiment, the improved LAMP Construct comprises at least one cancer antigen described in Table 1 (preferably the sequences/fragments/epitopes described in column 4 of Table 1) and/or the combinations described in paragraph [150] fused to the N-terminus of the lumenal domain of a LAMP protein, at least one homology domain of a LAMP protein, or at least one Cysteine Conserved Fragment of a LAMP protein. See, for example ILC-2 and ILC-6 of FIG. 1. In preferred embodiments, these constructs also comprise a transmembrane domain of a LAMP protein, and/or the cytosolic tail of a LAMP protein. In other preferred embodiments, when an antigen contains a transmembrane domain, the transmembrane domain of a LAMP protein and/or the cytosolic tail of a LAMP protein is unnecessary. In preferred embodiments, two homology domains are included in the improved LAMP Construct (e.g., ILC-1 of FIG. 1). In further preferred embodiments, the two homology domains are derived from a LAMP-1, LAMP-2, LAMP-3, or an Endolyn protein. Alternatively, the two homology domains are derived from different LAMP proteins. In these constructs comprising two homology domains, a LAMP hinge domain may also be included. The improved LAMP Constructs described in this paragraph are unexpected in view of the prior art as the antigen has always been placed in between the full lumenal LAMP-1 domain and the full LAMP-1 transmembrane/cytoplasmic tail, as fragments of the lumenal domain have not been reported to be effective in generating a robust immume response.

[0141] In another preferred embodiment, the improved LAMP Construct comprises at least one cancer antigen described in Table 1 (preferably the sequences/fragments/epitopes described in column 4 of Table 1) and/or the combinations described in paragraph [150] fused to the C-terminus of a single homology domain of a LAMP protein or a single Cysteine Conserved Fragment of a LAMP protein (e.g., ILC-5 of FIG. 1). In preferred embodiments, these constructs also comprise a transmembrane domain of a LAMP protein, and/or the cytosolic tail of a LAMP protein (e.g., ILC-3 of FIG. 1) In other preferred embodiments, when an antigen contains a transmembrane domain, the transmembrane domain of a LAMP protein and/or the cytosolic tail of a LAMP protein is unnecessary. Cancer antigens described in Table 1 can also be inserted into the complete LAMP constructs as depicted in FIG. 1. Alternatively, two homology domains from two different LAMP proteins may be used. The improved LAMP Constructs described in this paragraph are unexpected in view of the prior art as the antigen has always been placed in between the full lumenal LAMP-1 domain and the full LAMP-1 transmembrane/cytoplasmic tail, as fragments of the lumenal domain have not been reported to be effective in generating a robust immune response.

[0142] Thus, the improved LAMP Construct comprises at least one cancer antigen described in Table 1 (preferably the sequences/fragments/epitopes described in column 4 of Table 1) and/or the combinations described in paragraph [150] fused to the C-terminus of a single homology domain of a LAMP protein or a single Cysteine Conserved Fragment of a LAMP protein. See, for example, ILC-3 and ILC-5 of FIG. 1. In preferred embodiments, these constructs also comprise a transmembrane domain of a LAMP protein, and/or the cytosolic tail of a LAMP protein. In other preferred embodiments, when an antigen contains a transmembrane domain, the transmembrane domain of a LAMP protein and/or the cytosolic tail of a LAMP protein is unnecessary. The improved LAMP Constructs described in this paragraph are unexpected in view of the prior art as described above.

[0143] In another preferred embodiment, the improved LAMP Construct comprises at least one antigen of interest fused in between a first homology domain of a LAMP protein and a second homology domain of a LAMP protein (or at least between two Cysteine Conserved Fragments). See, for example, ILC-4 of FIG. 1. In preferred embodiments, the two homology domains are derived from LAMP-1, LAMP-2, LAMP-3, or an Endolyn protein. In these constructs, the antigen may be placed in the LAMP hinge region. Alternatively, two homology domains from two different LAMP proteins may be used. This arrangement of at least one cancer antigen described in Table 1 (preferably the sequences/fragments/epitopes described in column 4 of Table 1) and/or the combinations described in paragraph [150] fused in between two LAMP homology domains (including Cysteine Conserved Fragments) is unexpected in view of the prior art as described above.

[0144] Each of the improved LAMP Constructs defined above can be generated using the domains defined in the Figures. For example, it is specifically contemplated that the domains included in the improved LAMP Construct illustrated in FIG. 1, for example, can originate from sequences derived from orthologous sequences. See, FIGS. 3-10 for example. It is expressly contemplated that the equivalent domains defined in FIGS. 2A and 2B be used to generate the improved LAMP Constructs illustrated in FIG. 1 for orthologous sequences. Moreover, the orthologous sequences shown in FIGS. 3-10 are representative of the sequences that can be used to generate the domains. It is well within the skill in the art to identify other orthologous sequences and/or isotypes and comparing them to the alignments shown in FIGS. 3-10. Thus, by identifying the equivalent boundaries defined in FIGS. 2A and 2B for a human LAMP protein with the alignments shown in FIGS. 3-10, one can generate the improved LAMP Constructs illustrated in FIG. 1.

[0145] As would be well understood by the skilled artisan, the boundaries of each domain are an approximation and may be adjusted at least 1, 2, 3, 4, 5, 6, 7, 8, 9, or 10 amino acids based on cloning considerations and restriction enzyme placement. Therefore, when a particular domain (e.g., a LAMP Homology Domain) is included in the improved LAMP Construct, the amino acids beginning and ending of the domain may be adjust by at least 1, 2, 3, 4, 5, 6, 7, 8, 9, or 10 amino acids as those boundaries defined in FIG. 2A.

[0146] Each of the improved LAMP Constructs described above can additionally comprise a signal sequence and/or additional amino acids in between each domain for cloning purposes as is well known in the art. Additionally, the LAMP homologous domains, the LAMP lumenal domain, the LAMP transmembrane domain, and/or the LAMP cytosolic tail domain can originate from the same LAMP protein (e.g., human LAMP-1) or different LAMP proteins (e.g., lumenal domain from human LAMP-1 and transmembrane domain from human LAMP-2, and/or mixing of orthologous domains in the same gene family (e.g., LAMP-1) or different gene family (LAMP-1 and LAMP-2).

[0147] Polypeptide variants of the described LAMP Constructs are contemplated. For example, polypeptides at least about 60%, at least about 70%, at least about 75%, at least about 80%, at least about 85%, at least about 90%, at least about 95%, 96%, 97%, 98% or 99% identity to any of the improved LAMP Constructs described herein as well as polynucleotides encoding these variants. Variants of the improved LAMP Constructs retain the ability to function by targeting the antigenic sequence to the lysosome. For example, a modified lumenal sequence must retain the ability to traffic both membrane and non-membrane antigenic materials to an endosomal compartment with at least about 50%, at least about 60%, at least 70%, at least about 80%, at least about 90%, or at least about 100% efficacy compared to the original domain sequence, i.e., an efficacy that results in sufficient antigen presentation by a cell comprising the chimeric sequence for it to mount an immune response. In one aspect, sequences containing a suitable trafficking signal may be identified by constructing an improved LAMP Construct containing the well-characterized antigenic domain of ovalbumin, a transmembrane domain, and the cytoplasmic domain of a protein containing a putative lysosomal/endosomal targeting signal. Efficiency of targeting can be measured by determining the ability of antigen presenting cells, expressing the improved LAMP Construct, to stimulate HA epitope-specific, MHC class II restricted T-cells (see, e.g., Example 5 of U.S. Pat. No. 5,633,234).

[0148] Polynucleotides encoding any of the described improved LAMP Constructs are preferred embodiments of the invention, along with polynucleotides at least about 60%, at least about 70%, at least about 75%, at least about 80%, at least about 85%, at least about 90%, at least about 95%, 96%, 97%, 98% or 99% identity to any of the improved LAMP Construct polynucleotides described herein. Variants of the improved LAMP Constructs retain the ability to function by targeting the antigenic sequence to the lysosome. For example, a modified lumenal sequence must retain the ability to traffic both membrane and non-membrane antigenic materials to an endosomal compartment with at least about 50%, at least about 60%, at least 70%, at least about 80%, at least about 90%, or at least about 100% efficacy compared to the original domain sequence, i.e., an efficacy that results in sufficient antigen presentation by a cell comprising the chimeric sequence for it to mount an immune response. In one aspect, sequences containing a suitable trafficking signal may be identified by constructing an improved LAMP Construct containing the well-characterized antigenic domain of ovalbumin, a transmembrane domain, and the cytoplasmic domain of a protein containing a putative lysosomal/endosomal targeting signal. Efficiency of targeting can be measured by determining the ability of antigen presenting cells, expressing the improved LAMP Construct, to stimulate HA epitope-specific, MHC class II restricted T-cells (see, e.g., Example 5 of U.S. Pat. No. 5,633,234).

### Cancer Antigens

[0149] The following antigens shown in Table 1 can be cloned into each of the LAMP Constructs described herein using techniques well known to the skilled artisan. The sequences/fragments/epitopes described in the fourth column can be also cloned into the improved LAMP Constructs as described herein. Moreover, it is specifically contemplated that any one of the cancer antigen listed in Table 1 can be combined with any other antigen listed in Table 1 (including the sequences/fragments/epitopes described in the fourth column) and inserted into the improved LAMP Constructs as described herein.

| | | | Preferred Epitopes/Fragments that can be |
|---|---|---|---|
| SEQ | Protein Name | Accession/ | cloned into the LAMP Construts described |
| ID NO: | of each Antigen | Derived From | herein, comprise at least . . . |
| 114 | pp65 | ABQ23593 | The highlighted epitopes in FIG. 20, which |
| | | | include LLQTGIHVRVSQPSL and/or ALPLKMLNIPSIN |
| | | | VH and/or DQYVKVYLESFCEDV and/or IIKPGKISHIM |
| | | | LDVAFTSH and/or PQYSEHPTFTSQYRIQGKL and/or |
| | | | PPWQAGILARNLVPMV and/or KYQEFFWDANDIYRIFA |
| | | | wherein each epitope can be combined in any |
| | | | order and/or in any combination and cloned |
| | | | into a LAMP Construct described herein, |
| | | | wherein each epitope is preferably separated |
| | | | by a linker, such as, for example GPGPG or |
| | | | PMGLP. Representative construct inserts are |
| | | | shown as SEQ ID NO: 115 and SEQ ID NO: 116. |
| 117 | gB | P06473 | The highlighted epitopes shown in FIG. 20, |
| and | | | which include TTSAQTRSVYSQHVT and/or |
| 118 | | | QLIPDDYSNTHSTRYV and/or VSVFETSGGLVVFWQ |
| | | | and/or NSAYEYVDYLFKRMIDLS wherein each |
| | | | epitope can be combined in any order and/or |
| | | | in any combination and cloned into a LAMP |
| | | | Construct described herein, wherein each |
| | | | epitope is preferably separated by a linker, |
| | | | such as, for example GPGPG or PMGLP. |
| | | | Representative construct inserts are shown |
| | | | as SEQ ID NO: 119 and SEQ ID NO: 120. |
| 121 | IE1 | P13202 | The highlighted epitopes shown in FIG. 20, |
| | | | which include VLAELVKQIKVRVDMVRHRIKEHMLKKYTQ |
| | | | and/or IVPEDKREMWVACKIKELH and/or KDELRRKMMY |
| | | | MCYRNIEFFTKNSAFPKTT and/or SVMKRRIEEICMKVFAQ |
| | | | YI and/or AIAEESDEEEAIVAY and/or VKSEPVSEIEE |
| | | | VAPEEEEDG wherein each epitope can be |
| | | | combined in any order and/or in any |
| | | | combination and cloned into a LAMP Construct |
| | | | described herein, wherein each epitope is |
| | | | preferably separated by a linker, such as, |
| | | | for example GPGPG or MPGLP. Representative |
| | | | construct inserts are shown as SEQ ID NO: |
| | | | 122 and SEQ ID NO: 123. |
| 124 | Morpholigical | AAA66543 | SEQ ID NO: 125 |
| | transforming region | | |
| | II (“MTRII”) | | |
| 126 | US28 | AMJ53524 | SEQ ID NO: 127 |
| 128 | IGFBP2 | NP_000588 | (a) about amino acids 39-328 of SEQ ID NO: |
| | | | 128; (b) about amino acids 40-328 of SEQ |
| | | | ID NO: 128; (c) about amino acids 43-135 of |
| | | | SEQ ID NO: 128; (d) about amino acids 1-163 |
| | | | of SEQ ID NO: 128; (e) about amino acids |
| | | | 2-163 of SEQ ID NO: 128; (f) about amino |
| | | | acids 39-163 of SEQ ID NO: 128; (g) about |
| | | | amino acids 40-163 of SEQ ID NO: 128; (h) |
| | | | about amino acids 229-309 of SEQ ID NO: 128; |
| | | | (i) amino acids 2-328 of SEQ ID NO: 128; |
| | | | and/or (j) about amino acids 1-328 of |
| | | | SEQ ID NO: 128 |
| 129 | HCMVA Viral | P17150 | SEQ ID NO: 130 |
| | interleukin-10 | | |
| | (“IL10”) | | |
| 131 | HCMVM Membrane | F5HAM0 | SEQ ID NO: 132 |
| | glycoprotein UL144 | | |
| | (“UL144”) | | |
| 133 | HCMVM Protein UL141 | Q6RJQ3 | SEQ ID NO: 134 |
| | (“UL141”) | | |
| 135 | HCMVA Unique short | P09727 | SEQ ID NO: 136 |
| | glycoprotein (“US11”) | | |
| 137 | HCMV Envelope | A0A0G2TM81 | The highlighted epitopes shown in FIG. 20, |
| and | glycoprotein H OS | | which include TYNSSLRVSTVVRENAISFNFFQSYNQYYV |
| 138 | (“HOS”) | | FHMPR and/or DLTETLERYQQRLNTYALVSKDLASYRSFS |
| | | | and/or SHTTSGLHRPHFNQTCILFD and/or QLNRHSYLK |
| | | | DPDFLDAALDF wherein each epitope can be |
| | | | combined in any order and/or any |
| | | | combinaiton and cloned into a LAMP Construct |
| | | | described herein, wherein each epitope is |
| | | | preferably separated by a linker, such as, |
| | | | for example GPGPG or PMGLP. Representative |
| | | | construct inserts are shown as SEQ ID NO: |
| | | | 139 and SEQ ID NO: 140. |
| 141 | HCMVT Viral | Q6SWP7 | The highlighted epitopes shown in FIG. 20, |
| | transcription factor | | which include RRGRVKIDEVSRMFR and/or GIQIIYT |
| | IE2 (“IE2”) | | RNHEVKSE and/or LSTPFLMEHTMPVTHPPEVA wherein |
| | | | each epitope can be combined in any order |
| | | | and/or any combination and cloned into a |
| | | | LAMP Construct described herein, wherein |
| | | | each epitope is preferably separated by a |
| | | | linker, such as, for example GPGPG or PMGLP. |
| | | | Representative construct inserts are shown |
| | | | as SEQ ID NO: 142 and SEQ ID NO: 143. |
| 144 | TERT Isoform 1 | NP_937983.2 | SEQ ID NO: 145 |
| | (“TERT”) | | SEQ ID NO: 146 |
| 147 | Survivin | NP_001125727 | SEQ ID NO: 147; representative constructs |
| | | | include SEQ ID NO: 193-197. |
| 148 | Tetanus | 1AF9_A | The highlighted epitopes shown in FIG. 20, |
| | | | which include PGINGKAIHLVNNSEES and/or |
| | | | FNNFTVSFWLRVPKVSASHLEQYGT and/or YVSIDKFRIFC |
| | | | KALNPKEIEKLYTSYLS and/or ILRVGYNAPGIPLYKKMEA |
| | | | VKLRDLK wherein each epitope can be combined |
| | | | in any order and/or in any combination and |
| | | | cloned into a LAMP Construct described |
| | | | herein, wherein each epitope is preferably |
| | | | separated by a linker, such as, for |
| | | | example GPGPG or PMGLP. Representative |
| | | | construct inserts are shown as SEQ ID NO: |
| | | | 149 and SEQ ID NO: 150. |
| 151 | Cancer Testis Antigen | NP-001318.1 | Amino acids 1-155 of SEQ ID NO: 151 |
| | NY-ESO-1 (“NY-ESO-1”) | (SEQ ID NO: 151) | Amino acids 80-155 of SEQ ID NO: 151 |
| 152 | HER2 | AAA75439.1 | Construct comprising at least one of: amino |
| | | (SEQ ID NO: 152) | acids 23-652 and/or 690-1255 of SEQ ID NO: |
| | | | 152 wherein each epitope can be combined |
| | | | in any order and/or in any combination and |
| | | | cloned into a LAMP Construct described |
| | | | herein, wherein each epitope is preferably |
| | | | separated by a linker, such as, for example |
| | | | GPGPG or PMGLP. Representative construct |
| | | | inserts are shown as SEQ ID NO: 153 and |
| | | | SEQ ID NO: 154. |
| 155 | HER3 | NP_001973.2 | Construct comprising at least one of: amino |
| | | (SEQ ID NO: 155) | acids 20-643, 665-1201, and/or 1209-1342 of |
| | | | SEQ ID NO: 155, wherein each epitope can be |
| | | | combined in any order and/or in any |
| | | | combination and cloned into a LAMP |
| | | | Construct described herein, wherein each |
| | | | epitope is preferably separated by a |
| | | | linker, such as, for example GPGPG or |
| | | | PMGLP. Representative construct inserts |
| | | | are shown as SEQ ID NO: 156 and |
| | | | SEQ ID NO: 157 |
| 158 | HVEM | NP_003811.2 | Amino acids 39-202 (SEQ ID NO: 159) |
| | | (SEQ ID NO: 158) | |
| 160-163 | HPV Constructs | | Sequences used to create the constructs: |
| | | | (a) HPV 16 E6 (SEQ ID NO: 160); (b) HPV 18 |
| | | | E6 (SEQ ID NO: 161); (c) HPV 16 E7 (SEQ ID |
| | | | NO: 162); (d) HPV 18 E7 (SEQ ID NO: 163) |
| | | | Representative Constructs: |
| | | | SEQ ID NO: 164 (Representative HPV 16 E6-E7 |
| | | | Construct) |
| | | | SEQ ID NO: 165 (Representative HPV 18 E6-E7 |
| | | | Construct) |
| | | | SEQ ID NO: 166 (HPV 16 E6-linker-HPV 18 E6- |
| | | | linker-HPV 16 E7-linker-HPV 18 E7) |
| 169-172 | EBV Constructs | | Any of the following sequences, in any |
| | | | combination, could be used to create the |
| | | | constructs (a) EBV ENVA1 (SEQ ID NO: 169); |
| | | | (b) EBV Truncated EBNA-1 (SEQ ID NO: 170); |
| | | | (c) EBV gp350 (SEQ ID NO: 171); (d) EBV |
| | | | LMP2 (SEQ ID NO: 172). For example, a |
| | | | representative construct could comprise |
| | | | truncated EBNA-1 and LMP2. |
| 174-175 | HBV Constructs | | Any of the following sequences could be |
| | | | used (in either orientation) to create the |
| | | | constructs: |
| | | | HBV Middle S Protein (SEQ ID NO: 174) and |
| | | | HBV X Protein (SEQ ID NO: 175). For example, |
| | | | a representative construct could comprise |
| | | | Middle S Protein-X protein. |
| 176 | TIGIT | | SEQ ID NO: 176 |
| 177 | TEM8 | | SEQ ID NO: 177 |
| 178 | TEM1 | | SEQ ID NO: 178 |
| 179 | HER2 ECD + TM | | SEQ ID NO: 179 |
| 180 | CEA | | SEQ ID NO: 180 |
| 181 | TARP | | SEQ ID NO: 181 |
| 182 | PROSTEIN | | SEQ ID NO: 182 |
| 183 | PSMA | | SEQ ID NO: 183 |
| 184 | BIRC4 | | SEQ ID NO: 184 |
| 185 | Mucin-1 | | SEQ ID NO: 185 |
| 186 | Mucin-1 Isoform | | SEQ ID NO: 186 |
| 187 | CD40 Ligand | | SEQ ID NO: 187 |
| 188 | WT-1 | | SEQ ID NO: 188 |
| 189 | WT-1 Truncated | | SEQ ID NO: 189 |
| 190 | PRAME | | SEQ ID NO: 190 |
| 191 | LAGE-1 | | SEQ ID NO: 191 |
| 192 | MAGE A3 | | SEQ ID NO: 192 |
| 198 | 1A01_HLA-A/m | UniProtKB: P30443 | SEQ ID NO: 198 |
| 199 | 1A02 | UniProtKB: P01892 | SEQ ID NO: 199 |
| 200 | 5T4 | UniProtKB: Q13641 | SEQ ID NO: 200 |
| 201 | ACRBP | UniProtKB: Q8NEB7 | SEQ ID NO: 201 |
| 202 | AFP | UniProtKB: P02771 | SEQ ID NO: 202 |
| 203 | AKAP4 | UniProtKB: Q5JQC9 | SEQ ID NO: 203 |
| 204 | alpha-actinin-_4/m | UniProtKB: B4DSX0 | SEQ ID NO: 204 |
| 205 | alpha-actinin-_4/m | UniProtKB: B4E337 | SEQ ID NO: 205 |
| 206 | alpha-actinin-_4/m | UniProtKB: O43707 | SEQ ID NO: 206 |
| 207 | alpha-methylacyl- | UniProtKB: A0A024RE16 | SEQ ID NO: 207 |
| | coenzyme_A_racemase | | |
| 208 | alpha-methylacyl- | UniProtKB: A8KAC3 | SEQ ID NO: 208 |
| | coenzyme_A_racemase | | |
| 209 | ANDR | UniProtKB: P10275 | SEQ ID NO: 209 |
| 210 | ART-4 | UniProtKB: Q9ULX3 | SEQ ID NO: 210 |
| 211 | ARTC1/m | UniProtKB: P52961 | SEQ ID NO: 211 |
| 212 | AURKB | UniProtKB: Q96GD4 | SEQ ID NO: 212 |
| 213 | B2MG | UniProtKB: P61769 | SEQ ID NO: 213 |
| 214 | B3GN5 | UniProtKB: Q9BYG0 | SEQ ID NO: 214 |
| 215 | B4GN1 | UniProtKB: Q00973 | SEQ ID NO: 215 |
| 216 | B7H4 | UniProtKB: Q7Z7D3 | SEQ ID NO: 216 |
| 217 | BAGE-1 | UniProtKB: Q13072 | SEQ ID NO: 217 |
| 218 | BASI | UniProtKB: P35613 | SEQ ID NO: 218 |
| 219 | BCL-2 | UniProtKB: A9QXG9 | SEQ ID NO: 219 |
| 220 | bcr/abl | UniProtKB: A9UEZ4 | SEQ ID NO: 220 |
| 221 | bcr/abl | UniProtKB: A9UEZ7 | SEQ ID NO: 221 |
| 222 | bcr/abl | UniProtKB: A9UEZ8 | SEQ ID NO: 222 |
| 223 | bcr/abl | UniProtKB: A9UEZ9 | SEQ ID NO: 223 |
| 224 | bcr/abl | UniProtKB: A9UF00 | SEQ ID NO: 224 |
| 225 | bcr/abl | UniProtKB: A9UF01 | SEQ ID NO: 225 |
| 226 | bcr/abl | UniProtKB: A9UF03 | SEQ ID NO: 226 |
| 227 | bcr/abl | UniProtKB: A9UF04 | SEQ ID NO: 227 |
| 228 | bcr/abl | UniProtKB: A9UF05 | SEQ ID NO: 228 |
| 229 | bcr/abl | UniProtKB: A9UF06 | SEQ ID NO: 229 |
| 230 | bcr/abl | UniProtKB: A9UF08 | SEQ ID NO: 230 |
| 231 | beta-catenin/m | UniProtKB: P35222 | SEQ ID NO: 231 |
| 232 | beta-catenin/m | UniProtKB: Q8WYA6 | SEQ ID NO: 232 |
| 233 | BING-4 | UniProtKB: O15213 | SEQ ID NO: 233 |
| 234 | BIRC7 | UniProtKB: Q96CA5 | SEQ ID NO: 234 |
| 235 | BRCA1/m | UniProtKB: A0A024R1V0 | SEQ ID NO: 235 |
| 236 | BRCA1/m | UniProtKB: A0A024R1V7 | SEQ ID NO: 236 |
| 237 | BRCA1/m | UniProtKB: A0A024R1Z8 | SEQ ID NO: 237 |
| 238 | BRCA1/m | UniProtKB: A0A068BFX7 | SEQ ID NO: 238 |
| 239 | BRCA1/m | UniProtKB: C6YB45 | SEQ ID NO: 239 |
| 240 | BRCA1/m | UniProtKB: C6YB47 | SEQ ID NO: 240 |
| 241 | BRCA1/m | UniProtKB: G3XAC3 | SEQ ID NO: 241 |
| 242 | BY55 | UniProtKB: O95971 | SEQ ID NO: 242 |
| 243 | CAMEL | UniProtKB: O95987 | SEQ ID NO: 243 |
| 244 | CASPA | UniProtKB: Q92851-4 | SEQ ID NO: 244 |
| 245 | cathepsin_B | UniProtKB: A0A024R374 | SEQ ID NO: 245 |
| 246 | cathepsin_B | UniProtKB: P07858 | SEQ ID NO: 246 |
| 247 | cathepsin_L | UniProtKB: A0A024R276 | SEQ ID NO: 247 |
| 248 | cathepsin_L | UniProtKB: P07711 | SEQ ID NO: 248 |
| 249 | cathepsin_L | UniProtKB: Q9HBQ7 | SEQ ID NO: 249 |
| 250 | CD1A | UniProtKB: P06126 | SEQ ID NO: 250 |
| 251 | CD1B | UniProtKB: P29016 | SEQ ID NO: 251 |
| 252 | CD1C | UniProtKB: P29017 | SEQ ID NO: 252 |
| 253 | CD1D | UniProtKB: P15813 | SEQ ID NO: 253 |
| 254 | CD1E | UniProtKB: P15812 | SEQ ID NO: 254 |
| 255 | CD20 | UniProtKB: P11836 | SEQ ID NO: 255 |
| 256 | CD22 | UniProtKB: O60926 | SEQ ID NO: 256 |
| 257 | CD22 | UniProtKB: P20273 | SEQ ID NO: 257 |
| 258 | CD22 | UniProtKB: Q0EAF5 | SEQ ID NO: 258 |
| 259 | CD276 | UniProtKB: Q5ZPR3 | SEQ ID NO: 259 |
| 260 | CD33 | UniProtKB: B4DF51 | SEQ ID NO: 260 |
| 261 | CD33 | UniProtKB: P20138 | SEQ ID NO: 261 |
| 262 | CD33 | UniProtKB: Q546G0 | SEQ ID NO: 262 |
| 263 | CD3E | UniProtKB: P07766 | SEQ ID NO: 263 |
| 264 | CD3Z | UniProtKB: P20963 | SEQ ID NO: 264 |
| 265 | CD44_Isoform_1 | UniProtKB: P16070 | SEQ ID NO: 265 |
| 266 | CD44_Isoform_6 | UniProtKB: P16070-6 | SEQ ID NO: 266 |
| 267 | CD4 | UniProtKB: P01730 | SEQ ID NO: 267 |
| 268 | CD52 | UniProtKB: P31358 | SEQ ID NO: 268 |
| 269 | CD52 | UniProtKB: Q6IBD0 | SEQ ID NO: 269 |
| 270 | CD52 | UniProtKB: V9HWN9 | SEQ ID NO: 270 |
| 271 | CD55 | UniProtKB: B1AP15 | SEQ ID NO: 271 |
| 272 | CD55 | UniProtKB: D3DT85 | SEQ ID NO: 272 |
| 273 | CD55 | UniProtKB: D3DT86 | SEQ ID NO: 273 |
| 274 | CD55 | UniProtKB: P08174 | SEQ ID NO: 274 |
| 275 | CD56 | UniProtKB: P13591 | SEQ ID NO: 275 |
| 276 | CD80 | UniProtKB: A0N0P2 | SEQ ID NO: 276 |
| 277 | CD80 | UniProtKB: P33681 | SEQ ID NO: 277 |
| 278 | CD86 | UniProtKB: P42081 | SEQ ID NO: 278 |
| 279 | CD8A | UniProtKB: P01732 | SEQ ID NO: 279 |
| 280 | CDC27/m | UniProtKB: G5EA36 | SEQ ID NO: 280 |
| 281 | CDC27/m | UniProtKB: P30260 | SEQ ID NO: 281 |
| 282 | CDE30 | UniProtKB: P28908 | SEQ ID NO: 282 |
| 283 | CDK4/m | UniProtKB: A0A024RBB6 | SEQ ID NO: 283 |
| 284 | CDK4/m | UniProtKB: P11802 | SEQ ID NO: 284 |
| 285 | CDK4/m | UniProtKB: Q6LC83 | SEQ ID NO: 285 |
| 286 | CDK4/m | UniProtKB: Q96BE9 | SEQ ID NO: 286 |
| 287 | CDKN2A/m | UniProtKB: D1LYX3 | SEQ ID NO: 287 |
| 288 | CDKN2A/m | UniProtKB: G3XAG3 | SEQ ID NO: 288 |
| 289 | CDKN2A/m | UniProtKB: K7PML8 | SEQ ID NO: 289 |
| 290 | CDKN2A/m | UniProtKB: L8E941 | SEQ ID NO: 290 |
| 291 | CDKN2A/m | UniProtKB: Q8N726 | SEQ ID NO: 291 |
| 292 | CEA | RefSeq: NP_004354 | SEQ ID NO: 292 |
| 293 | CEAM6 | UniProtKB: P40199 | SEQ ID NO: 293 |
| 294 | CH3L2 | UniProtKB: Q15782 | SEQ ID NO: 294 |
| 295 | CLCA2 | UniProtKB: Q9UQC9 | SEQ ID NO: 295 |
| 296 | CML28 | UniProtKB: Q9NQT4 | SEQ ID NO: 296 |
| 297 | CML66 | UniProtKB: Q96R56 | SEQ ID NO: 297 |
| 298 | COA-1/m | UniProtKB: Q5T124 | SEQ ID NO: 298 |
| 299 | coactosin-like_protein | UniProtKB: Q14019 | SEQ ID NO: 299 |
| 300 | collagen_XXIII | UniProtKB: L8EAS4 | SEQ ID NO: 300 |
| 301 | collagen_XXIII | UniProtKB: Q86Y22 | SEQ ID NO: 301 |
| 302 | COX-2 | UniProtKB: Q6ZYK7 | SEQ ID NO: 302 |
| 303 | CP1B1 | UniProtKB: Q16678 | SEQ ID NO: 303 |
| 304 | CSAG2 | UniProtKB: Q9Y5P2-2 | SEQ ID NO: 304 |
| 305 | CSAG2 | UniProtKB: Q9Y5P2 | SEQ ID NO: 305 |
| 306 | CT45A1 | UniProtKB: Q5HYN5 | SEQ ID NO: 306 |
| 307 | CT55 | UniProtKB: Q8WUE5 | SEQ ID NO: 307 |
| 308 | CT-_9/BRD6 | UniProtKB: Q58F21 | SEQ ID NO: 308 |
| 309 | CTAG2_Isoform_LAGE-1A | UniProtKB: O75638-2 | SEQ ID NO: 309 |
| 310 | CTAG2_Isoform_LAGE-1B | UniProtKB: O75638 | SEQ ID NO: 310 |
| 311 | CTCFL | UniProtKB: Q8NI51 | SEQ ID NO: 311 |
| 312 | Cten | UniProtKB: Q8IZW8 | SEQ ID NO: 312 |
| 313 | cyclin_B1 | UniProtKB: P14635 | SEQ ID NO: 313 |
| 314 | cyclin_D1 | UniProtKB: P24385 | SEQ ID NO: 314 |
| 315 | cyp-B | UniProtKB: P23284 | SEQ ID NO: 315 |
| 316 | DAM-10 | UniProtKB: P43366 | SEQ ID NO: 316 |
| 317 | DEP1A | UniProtKB: Q5TB30 | SEQ ID NO: 317 |
| 318 | E7 | UniProtKB: P03129 | SEQ ID NO: 318 |
| 319 | E7 | UniProtKB: P06788 | SEQ ID NO: 319 |
| 320 | E7 | UniProtKB: P17387 | SEQ ID NO: 320 |
| 321 | E7 | UniProtKB: P06429 | SEQ ID NO: 321 |
| 322 | E7 | UniProtKB: P27230 | SEQ ID NO: 322 |
| 323 | E7 | UniProtKB: P24837 | SEQ ID NO: 323 |
| 324 | E7 | UniProtKB: P21736 | SEQ ID NO: 324 |
| 325 | E7 | UniProtKB: P26558 | SEQ ID NO: 325 |
| 326 | E7 | UniProtKB: P36831 | SEQ ID NO: 326 |
| 327 | E7 | UniProtKB: P36833 | SEQ ID NO: 327 |
| 328 | E7 | UniProtKB: Q9QCZ1 | SEQ ID NO: 328 |
| 329 | E7 | UniProtKB: Q81965 | SEQ ID NO: 329 |
| 330 | E7 | UniProtKB: Q80956 | SEQ ID NO: 330 |
| 331 | EF1A2 | UniProtKB: Q05639 | SEQ ID NO: 331 |
| 332 | EFTUD2/m | UniProtKB: Q15029 | SEQ ID NO: 332 |
| 333 | EGFR | UniProtKB: A0A0B4J1Y5 | SEQ ID NO: 333 |
| 334 | EGFR | UniProtKB: E7BSV0 | SEQ ID NO: 334 |
| 335 | EGFR | UniProtKB: L0R6G1 | SEQ ID NO: 335 |
| 336 | EGFR | UniProtKB: P00533-2 | SEQ ID NO: 336 |
| 337 | EGFR | UniProtKB: P00533 | SEQ ID NO: 337 |
| 338 | EGFR | UniProtKB: Q147T7 | SEQ ID NO: 338 |
| 339 | EGFR | UniProtKB: Q504U8 | SEQ ID NO: 339 |
| 340 | EGFR | UniProtKB: Q8NDU8 | SEQ ID NO: 340 |
| 341 | EGLN3 | UniProtKB: Q9H6Z9 | SEQ ID NO: 341 |
| 342 | ELF2/m | UniProtKB: B7Z720 | SEQ ID NO: 342 |
| 343 | EMMPRIN | UniProtKB: Q54A51 | SEQ ID NO: 343 |
| 344 | EpCam | UniProtKB: P16422 | SEQ ID NO: 344 |
| 345 | EphA2 | UniProtKB: P29317 | SEQ ID NO: 345 |
| 346 | EphA3 | UniProtKB: P29320 | SEQ ID NO: 346 |
| 347 | EphA3 | UniProtKB: Q6P4R6 | SEQ ID NO: 347 |
| 348 | ErbB3 | UniProtKB: B3KWG5 | SEQ ID NO: 348 |
| 349 | ErbB3 | UniProtKB: B4DGQ7 | SEQ ID NO: 349 |
| 350 | ERBB4 | UniProtKB: Q15303 | SEQ ID NO: 350 |
| 351 | ERG | UniProtKB: P11308 | SEQ ID NO: 351 |
| 352 | ETV6 | UniProtKB: P41212 | SEQ ID NO: 352 |
| 353 | EWS | UniProtKB: Q01844 | SEQ ID NO: 353 |
| 354 | EZH2 | UniProtKB: F2YMM1 | SEQ ID NO: 354 |
| 355 | EZH2 | UniProtKB: G3XAL2 | SEQ ID NO: 355 |
| 356 | EZH2 | UniProtKB: L0R855 | SEQ ID NO: 356 |
| 357 | EZH2 | UniProtKB: Q15910 | SEQ ID NO: 357 |
| 358 | EZH2 | UniProtKB: 5453R8 | SEQ ID NO: 358 |
| 359 | FABP7 | UniProtKB: O15540 | SEQ ID NO: 359 |
| 360 | FCGR3A_Version_1 | UniProtKB: P08637 | SEQ ID NO: 360 |
| 361 | FCGR3A_Version_2 | CCDS: CCDS1232.1 | SEQ ID NO: 361 |
| 362 | FGF5 | UniProtKB: P12034 | SEQ ID NO: 362 |
| 363 | FGF5 | UniProtKB: Q60518 | SEQ ID NO: 363 |
| 364 | FGFR2 | UniProtKB: P21802 | SEQ ID NO: 364 |
| 365 | fibronectin | UniProtKB: A0A024R5I6 | SEQ ID NO: 365 |
| 366 | fibronectin | UniProtKB: A0A024RB01 | SEQ ID NO: 366 |
| 367 | fibronectin | UniProtKB: A0A024RDT9 | SEQ ID NO: 367 |
| 368 | fibronectin | UniProtKB: A0A024RDV5 | SEQ ID NO: 368 |
| 369 | fibronectin | UniProtKB: A6NH44 | SEQ ID NO: 369 |
| 370 | fibronectin | UniProtKB: A8K6A5 | SEQ ID NO: 370 |
| 371 | fibronectin | UniProtKB: B2R627 | SEQ ID NO: 371 |
| 372 | fibronectin | UniProtKB: B3KXM5 | SEQ ID NO: 372 |
| 373 | fibronectin | UniProtKB: B4DIC5 | SEQ ID NO: 373 |
| 374 | fibronectin | UniProtKB: B4DN21 | SEQ ID NO: 374 |
| 375 | fibronectin | UniProtKB: B4D598 | SEQ ID NO: 375 |
| 376 | fibronectin | UniProtKB: B4DTH2 | SEQ ID NO: 376 |
| 377 | fibronectin | UniProtKB: B4DTK1 | SEQ ID NO: 377 |
| 378 | fibronectin | UniProtKB: B4DU16 | SEQ ID NO: 378 |
| 379 | fibronectin | UniProtKB: B7Z3W5 | SEQ ID NO: 379 |
| 380 | fibronectin | UniProtKB: B7Z939 | SEQ ID NO: 380 |
| 381 | fibronectin | UniProtKB: G5E9X3 | SEQ ID NO: 381 |
| 382 | fibronectin | UniProtKB: Q9H382 | SEQ ID NO: 382 |
| 383 | FOS | UniProtKB: P01100 | SEQ ID NO: 383 |
| 384 | FOXP3 | UniProtKB: Q9BZS1 | SEQ ID NO: 384 |
| 385 | FUT1 | UniProtKB: P19526 | SEQ ID NO: 385 |
| 386 | G250 | UniProtKB: Q16790 | SEQ ID NO: 386 |
| 387 | GAGE-1 | Genbank: AAA82744 | SEQ ID NO: 387 |
| 388 | GAGE-2 | UniProtKB: Q6NT46 | SEQ ID NO: 388 |
| 389 | GAGE-3 | UniProtKB: Q13067 | SEQ ID NO: 389 |
| 390 | GAGE-4 | UniProtKB: Q13068 | SEQ ID NO: 390 |
| 391 | GAGE-5 | UniProtKB: Q13069 | SEQ ID NO: 391 |
| 392 | GAGE-6 | UniProtKB: Q13070 | SEQ ID NO: 392 |
| 393 | GAGE7b | UniProtKB: O76087 | SEQ ID NO: 393 |
| 394 | GAGE-8_(GAGE-2D) | UniProtKB: Q9UEU5 | SEQ ID NO: 394 |
| 395 | GASR | UniProtKB: P32239 | SEQ ID NO: 395 |
| 396 | GnT-V | UniProtKB: Q09328 | SEQ ID NO: 396 |
| 397 | GPC3 | UniProtKB: I6QJG3 | SEQ ID NO: 397 |
| 398 | GPC3 | UniProtKB: P51654 | SEQ ID NO: 398 |
| 399 | GPC3 | UniProtKB: Q8IYG2 | SEQ ID NO: 399 |
| 400 | GPNMB/m | UniProtKB: A0A024RA55 | SEQ ID NO: 400 |
| 401 | GPNMB/m | UniProtKB: Q14956 | SEQ ID NO: 401 |
| 402 | GPNMB/m | UniProtKB: Q8IXJ5 | SEQ ID NO: 402 |
| 403 | GPNMB/m | UniProtKB: Q96F58 | SEQ ID NO: 403 |
| 404 | GRM3 | UniProtKB: Q14832 | SEQ ID NO: 404 |
| 405 | HAGE | UniProtKB: Q9NXZ2 | SEQ ID NO: 405 |
| 406 | hepsin | UniProtKB: B2ZDQ2 | SEQ ID NO: 406 |
| 407 | hepsin | UniProtKB: P05981 | SEQ ID NO: 407 |
| 408 | Her2/neu | UniProtKB: B4DTR1 | SEQ ID NO: 408 |
| 409 | Her2/neu | UniProtKB: L8E8G2 | SEQ ID NO: 409 |
| 410 | Her2/neu | UniProtKB: P04626 | SEQ ID NO: 410 |
| 411 | Her2/neu | UniProtKB: Q9UK79 | SEQ ID NO: 411 |
| 412 | HLA-A2/m | UniProtKB: Q95387 | SEQ ID NO: 412 |
| 413 | HLA-A2/m | UniProtKB: Q9MYF8 | SEQ ID NO: 413 |
| 414 | homeobox_NKX3.1 | UniProtKB: Q99801 | SEQ ID NO: 414 |
| 415 | HOM-TES-85 | UniProtKB: B2RBQ6 | SEQ ID NO: 415 |
| 416 | HOM-TES-85 | UniProtKB: Q9P127 | SEQ ID NO: 416 |
| 417 | HPG1 | Pubmed: 12543784 | SEQ ID NO: 417 |
| 418 | HS71A | UniProtKB: P0DMV8 | SEQ ID NO: 418 |
| 419 | HS71B | UniProtKB: P0DMV9 | SEQ ID NO: 419 |
| 420 | HST-2 | UniProtKB: P10767 | SEQ ID NO: 420 |
| 421 | hTERT | UniProtKB: O94807 | SEQ ID NO: 421 |
| 422 | iCE | UniProtKB: O00748 | SEQ ID NO: 422 |
| 423 | IF2B3 | UniProtKB: O00425 | SEQ ID NO: 423 |
| 424 | IL-13Ra2 | UniProtKB: Q14627 | SEQ ID NO: 424 |
| 425 | IL2-RA | UniProtKB: P01589 | SEQ ID NO: 425 |
| 426 | IL2-RB | UniProtKB: P14784 | SEQ ID NO: 426 |
| 427 | IL2-RG | UniProtKB: P31785 | SEQ ID NO: 427 |
| 428 | IMP3 | UniProtKB: Q9NV31 | SEQ ID NO: 428 |
| 429 | ITA5 | UniProtKB: P08648 | SEQ ID NO: 429 |
| 430 | ITB1 | UniProtKB: P05556 | SEQ ID NO: 430 |
| 431 | ITB6 | UniProtKB: P18564 | SEQ ID NO: 431 |
| 432 | kallikrein-2 | UniProtKB: A0A024R4J4 | SEQ ID NO: 432 |
| 433 | kallikrein-2 | UniProtKB: A0A024R4N3 | SEQ ID NO: 433 |
| 434 | kallikrein-2 | UniProtKB: B0AZU9 | SEQ ID NO: 434 |
| 435 | kallikrein-2 | UniProtKB: B4DU77 | SEQ ID NO: 435 |
| 436 | kallikrein-2 | UniProtKB: P20151 | SEQ ID NO: 436 |
| 437 | kallikrein-2 | UniProtKB: Q6T774 | SEQ ID NO: 437 |
| 438 | kallikrein-2 | UniProtKB: Q6T775 | SEQ ID NO: 438 |
| 439 | kallikrein-4 | UniProtKB: A0A0C4DFQ5 | SEQ ID NO: 439 |
| 440 | kallikrein-4 | UniProtKB: Q5BQA0 | SEQ ID NO: 440 |
| 441 | kallikrein-4 | UniProtKB: Q96PT0 | SEQ ID NO: 441 |
| 442 | kallikrein-4 | UniProtKB: Q96PT1 | SEQ ID NO: 442 |
| 443 | kallikrein-4 | UniProtKB: Q9Y5K2 | SEQ ID NO: 443 |
| 444 | KI20A | UniProtKB: O95235 | SEQ ID NO: 444 |
| 445 | KIAA0205 | UniProtKB: Q92604 | SEQ ID NO: 445 |
| 446 | KIF2C | UniProtKB: Q99661 | SEQ ID NO: 446 |
| 447 | KK-LC-1 | UniProtKB: Q5H943 | SEQ ID NO: 447 |
| 448 | LDLR | UniProtKB: P01130 | SEQ ID NO: 448 |
| 449 | LGMN | UniProtKB: Q99538 | SEQ ID NO: 449 |
| 450 | LIRB2 | UniProtKB: Q8N423 | SEQ ID NO: 450 |
| 451 | LY6K | UniProtKB: Q17RY6 | SEQ ID NO: 451 |
| 452 | MAGA5 | UniProtKB: P43359 | SEQ ID NO: 452 |
| 453 | MAGA8 | UniProtKB: P43361 | SEQ ID NO: 453 |
| 454 | MAGAB | UniProtKB: P43364 | SEQ ID NO: 454 |
| 455 | MAGE-A10 | UniProtKB: A0A024RC14 | SEQ ID NO: 455 |
| 456 | MAGE-A12 | UniProtKB: P43365 | SEQ ID NO: 456 |
| 457 | MAGE-A1 | UniProtKB: P43355 | SEQ ID NO: 457 |
| 458 | MAGE-A2 | UniProtKB: P43356 | SEQ ID NO: 458 |
| 459 | MAGE-A3 | UniProtKB: P43357 | SEQ ID NO: 459 |
| 460 | MAGE-A4 | UniProtKB: A0A024RC12 | SEQ ID NO: 460 |
| 461 | MAGE-A4 | UniProtKB: P43358 | SEQ ID NO: 461 |
| 462 | MAGE-A4 | UniProtKB: Q1RN33 | SEQ ID NO: 462 |
| 463 | MAGE-A6 | UniProtKB: A8K072 | SEQ ID NO: 463 |
| 464 | MAGE-A6 | UniProtKB: P43360 | SEQ ID NO: 464 |
| 465 | MAGE-A6 | UniProtKB: Q6FHI5 | SEQ ID NO: 465 |
| 466 | MAGE-A9 | UniProtKB: P43362 | SEQ ID NO: 466 |
| 467 | MAGE-B10 | UniProtKB: Q96LZ2 | SEQ ID NO: 467 |
| 468 | MAGE-B16 | UniProtKB: A2A368 | SEQ ID NO: 468 |
| 469 | MAGE-B17 | UniProtKB: A8MXT2 | SEQ ID NO: 469 |
| 470 | MAGE-_B1 | UniProtKB: Q96TG1 | SEQ ID NO: 470 |
| 471 | MAGE-B2 | UniProtKB: O15479 | SEQ ID NO: 471 |
| 472 | MAGE-B3 | UniProtKB: O15480 | SEQ ID NO: 472 |
| 473 | MAGE-B4 | UniProtKB: O15481 | SEQ ID NO: 473 |
| 474 | MAGE-B5 | UniProtKB: Q9BZ81 | SEQ ID NO: 474 |
| 475 | MAGE-B6 | UniProtKB: Q8N7X4 | SEQ ID NO: 475 |
| 476 | MAGE-C1 | UniProtKB: O60732 | SEQ ID NO: 476 |
| 477 | MAGE-C2 | UniProtKB: Q9UBF1 | SEQ ID NO: 477 |
| 478 | MAGE-C3 | UniProtKB: Q8TD91 | SEQ ID NO: 478 |
| 479 | MAGE-D1 | UniProtKB: Q9Y5V3 | SEQ ID NO: 479 |
| 480 | MAGE-D2 | UniProtKB: Q9UNF1 | SEQ ID NO: 480 |
| 481 | MAGE-D4 | UniProtKB: Q96JG8 | SEQ ID NO: 481 |
| 482 | MAGE-_E1 | UniProtKB: Q6IAI7 | SEQ ID NO: 482 |
| 483 | MAGE-E1(MAGE1) | UniProtKB: Q9HCI5 | SEQ ID NO: 483 |
| 484 | MAGE-E2 | UniProtKB: Q8TD90 | SEQ ID NO: 484 |
| 485 | MAGE-F1 | UniProtKB: Q9HAY2 | SEQ ID NO: 485 |
| 486 | MAGE-H1 | UniProtKB: Q9H213 | SEQ ID NO: 486 |
| 487 | MAGEL2 | UniProtKB: Q9UJ55 | SEQ ID NO: 487 |
| 488 | mammaglobin_A | UniProtKB: Q13296 | SEQ ID NO: 488 |
| 489 | mammaglobin_A | UniProtKB: Q6NX70 | SEQ ID NO: 489 |
| 490 | MART-1/melan-A | UniProtKB: Q16655 | SEQ ID NO: 490 |
| 491 | MART-2 | UniProtKB: Q5VTY9 | SEQ ID NO: 491 |
| 492 | MC1_R | UniProtKB: Q01726 | SEQ ID NO: 492 |
| 493 | MC1_R | UniProtKB: Q1JUL4 | SEQ ID NO: 493 |
| 494 | MC1_R | UniProtKB: Q1JUL6 | SEQ ID NO: 494 |
| 495 | MC1_R | UniProtKB: Q1JUL8 | SEQ ID NO: 495 |
| 496 | MC1_R | UniProtKB: Q1JUL9 | SEQ ID NO: 496 |
| 497 | MC1_R | UniProtKB: Q1JUM0 | SEQ ID NO: 497 |
| 498 | MC1_R | UniProtKB: Q1JUM2 | SEQ ID NO: 498 |
| 499 | MC1_R | UniProtKB: Q1JUM3 | SEQ ID NO: 499 |
| 500 | MC1_R | UniProtKB: Q1JUM4 | SEQ ID NO: 500 |
| 501 | MC1_R | UniProtKB: Q1JUM5 | SEQ ID NO: 501 |
| 502 | MC1_R | UniProtKB: Q6UR92 | SEQ ID NO: 502 |
| 503 | MC1_R | UniProtKB: Q6UR94 | SEQ ID NO: 503 |
| 504 | MC1_R | UniProtKB: Q6UR95 | SEQ ID NO: 504 |
| 505 | MC1_R | UniProtKB: Q6UR96 | SEQ ID NO: 505 |
| 506 | MC1_R | UniProtKB: Q6UR97 | SEQ ID NO: 506 |
| 507 | MC1_R | UniProtKB: Q6UR98 | SEQ ID NO: 507 |
| 508 | MC1_R | UniProtKB: Q6UR99 | SEQ ID NO: 508 |
| 509 | MC1_R | UniProtKB: Q6URA0 | SEQ ID NO: 509 |
| 510 | MC1_R | UniProtKB: Q86YW1 | SEQ ID NO: 510 |
| 511 | MC1_R | UniProtKB: V9Q552 | SEQ ID NO: 511 |
| 512 | MC1_R | UniProtKB: V9Q671 | SEQ ID NO: 512 |
| 513 | MC1_R | UniProtKB: V9Q783 | SEQ ID NO: 513 |
| 514 | MC1_R | UniProtKB: V9Q7F1 | SEQ ID NO: 514 |
| 515 | MC1_R | UniProtKB: V9Q8N1 | SEQ ID NO: 515 |
| 516 | MC1_R | UniProtKB: V9Q977 | SEQ ID NO: 516 |
| 517 | MC1_R | UniProtKB: V9Q9P5 | SEQ ID NO: 517 |
| 518 | MC1_R | UniProtKB: V9Q9R8 | SEQ ID NO: 518 |
| 519 | MC1_R | UniProtKB: V9QAE0 | SEQ ID NO: 519 |
| 520 | MC1_R | UniProtKB: V9QAR2 | SEQ ID NO: 520 |
| 521 | MC1_R | UniProtKB: V9QAW3 | SEQ ID NO: 521 |
| 522 | MC1_R | UniProtKB: V9QB02 | SEQ ID NO: 522 |
| 523 | MC1_R | UniProtKB: V9QB58 | SEQ ID NO: 523 |
| 524 | MC1_R | UniProtKB: V9QBY6 | SEQ ID NO: 524 |
| 525 | MC1_R | UniProtKB: V9QC17 | SEQ ID NO: 525 |
| 526 | MC1_R | UniProtKB: V9QC66 | SEQ ID NO: 526 |
| 527 | MC1_R | UniProtKB: V9QCQ4 | SEQ ID NO: 527 |
| 528 | MC1_R | UniProtKB: V9QDF4 | SEQ ID NO: 528 |
| 529 | MC1_R | UniProtKB: V9QDN7 | SEQ ID NO: 529 |
| 530 | MC1_R | UniProtKB: V9QDQ6 | SEQ ID NO: 530 |
| 531 | mesothelin | UniProtKB: Q13421 | SEQ ID NO: 531 |
| 532 | MITF | UniProtKB: O75030-8 | SEQ ID NO: 532 |
| 533 | MITF | UniProtKB: O75030-9 | SEQ ID NO: 533 |
| 534 | MITF | UniProtKB: O75030 | SEQ ID NO: 534 |
| 535 | MMP1_1 | UniProtKB: B3KQS8 | SEQ ID NO: 535 |
| 536 | MMP7 | UniProtKB: P09237 | SEQ ID NO: 536 |
| 537 | MUC-1 | Genbank: AAA60019 | SEQ ID NO: 537 |
| 538 | MUM-1/m | RefSeq: NP_116242 | SEQ ID NO: 538 |
| 539 | MUM-2/m | UniProtKB: Q9Y5R8 | SEQ ID NO: 539 |
| 540 | MYO1A | UniProtKB: Q9UBC5 | SEQ ID NO: 540 |
| 541 | MYO1B | UniProtKB: O43795 | SEQ ID NO: 541 |
| 542 | MYO1C | UniProtKB: O00159 | SEQ ID NO: 542 |
| 543 | MYO1D | UniProtKB: O94832 | SEQ ID NO: 543 |
| 544 | MYO1E | UniProtKB: Q12965 | SEQ ID NO: 544 |
| 545 | MYO1F | UniProtKB: O00160 | SEQ ID NO: 545 |
| 546 | MYO1G | UniProtKB: B0I1T2 | SEQ ID NO: 546 |
| 547 | MYO1H | RefSeq: NP_001094891 | SEQ ID NO: 547 |
| 548 | NA17 | UniProtKB: Q3V5L5 | SEQ ID NO: 548 |
| 549 | NA88-A | Pubmed: 10790436 | SEQ ID NO: 549 |
| 550 | Neo-PAP | UniProtKB: Q9BWT3 | SEQ ID NO: 550 |
| 551 | NFYC/m | UniProtKB: Q13952 | SEQ ID NO: 551 |
| 552 | NGEP | UniProtKB: Q6IWH7 | SEQ ID NO: 552 |
| 553 | NPM | UniProtKB: P06748 | SEQ ID NO: 553 |
| 554 | NRCAM | UniProtKB: Q92823 | SEQ ID NO: 554 |
| 555 | NSE | UniProtKB: P09104 | SEQ ID NO: 555 |
| 556 | NUF2 | UniProtKB: Q9BZD4 | SEQ ID NO: 556 |
| 557 | NY-ESO-1 | UniProtKB: P78358 | SEQ ID NO: 557 |
| 558 | OA1 | UniProtKB: P51810 | SEQ ID NO: 558 |
| 559 | OGT | UniProtKB: O15294 | SEQ ID NO: 559 |
| 560 | OS-9 | UniProtKB: B4DH11 | SEQ ID NO: 560 |
| 561 | OS-9 | UniProtKB: B4E321 | SEQ ID NO: 561 |
| 562 | OS-9 | UniProtKB: B7Z8E7 | SEQ ID NO: 562 |
| 563 | OS-9 | UniProtKB: Q13438 | SEQ ID NO: 563 |
| 564 | osteocalcin | UniProtKB: P02818 | SEQ ID NO: 564 |
| 565 | osteopontin | UniProtKB: A0A024RDE2 | SEQ ID NO: 565 |
| 566 | osteopontin | UniProtKB: A0A024RDE6 | SEQ ID NO: 566 |
| 567 | osteopontin | UniProtKB: A0A024RDJ0 | SEQ ID NO: 567 |
| 568 | osteopontin | UniProtKB: B7Z351 | SEQ ID NO: 568 |
| 569 | osteopontin | UniProtKB: F2YQ21 | SEQ ID NO: 569 |
| 570 | osteopontin | UniProtKB: P10451 | SEQ ID NO: 570 |
| 571 | p53 | UniProtKB: P04637 | SEQ ID NO: 571 |
| 572 | PAGE-4 | UniProtKB: O60829 | SEQ ID NO: 572 |
| 573 | PAI-1 | UniProtKB: P05121 | SEQ ID NO: 573 |
| 574 | PAI-2 | UniProtKB: P05120 | SEQ ID NO: 574 |
| 575 | PAP | UniProtKB: Q06141 | SEQ ID NO: 575 |
| 576 | PAP | UniProtKB: Q53S56 | SEQ ID NO: 576 |
| 577 | PATE | UniProtKB: Q8WXA2 | SEQ ID NO: 577 |
| 578 | PAX3 | UniProtKB: P23760 | SEQ ID NO: 578 |
| 579 | PAX5 | UniProtKB: Q02548 | SEQ ID NO: 579 |
| 580 | PD1L1 | UniProtKB: Q9NZQ7 | SEQ ID NO: 580 |
| 581 | PDCD1 | UniProtKB: Q15116 | SEQ ID NO: 581 |
| 582 | PDEF | UniProtKB: O95238 | SEQ ID NO: 582 |
| 583 | PECA1 | UniProtKB: P16284 | SEQ ID NO: 583 |
| 584 | PGCB | UniProtKB: Q96GW7 | SEQ ID NO: 584 |
| 585 | PGFRB | UniProtKB: P09619 | SEQ ID NO: 585 |
| 586 | Pim-1_-Kinase | UniProtKB: A0A024RD25 | SEQ ID NO: 586 |
| 587 | Pin-1 | UniProtKB: O15428 | SEQ ID NO: 587 |
| 588 | Pin-1 | UniProtKB: Q13526 | SEQ ID NO: 588 |
| 589 | Pin-1 | UniProtKB: Q49AR7 | SEQ ID NO: 589 |
| 590 | PLAC1 | UniProtKB: Q9HBJ0 | SEQ ID NO: 590 |
| 591 | PMEL | UniProtKB: P40967 | SEQ ID NO: 591 |
| 592 | PML | UniProtKB: P29590 | SEQ ID NO: 592 |
| 593 | POTEF | UniProtKB: A5A3E0 | SEQ ID NO: 593 |
| 594 | POTE | UniProtKB: Q86YR6 | SEQ ID NO: 594 |
| 595 | PRAME | UniProtKB: A0A024R1E6 | SEQ ID NO: 595 |
| 596 | PRAME | UniProtKB: P78395 | SEQ ID NO: 596 |
| 597 | PRDX5/m | UniProtKB: P30044 | SEQ ID NO: 597 |
| 598 | PRM2 | UniProtKB: P04554 | SEQ ID NO: 598 |
| 599 | prostein | UniProtKB: Q96JT2 | SEQ ID NO: 599 |
| 600 | proteinase-3 | UniProtKB: D6CHE9 | SEQ ID NO: 600 |
| 601 | proteinase-3 | UniProtKB: P24158 | SEQ ID NO: 601 |
| 602 | PSA | UniProtKB: P55786 | SEQ ID NO: 602 |
| 603 | PSB9 | UniProtKB: P28065 | SEQ ID NO: 603 |
| 604 | PSCA | UniProtKB: D3DWI6 | SEQ ID NO: 604 |
| 605 | PSCA | UniProtKB: O43653 | SEQ ID NO: 605 |
| 606 | PSGR | UniProtKB: Q9H255 | SEQ ID NO: 606 |
| 607 | PSM | UniProtKB: Q04609 | SEQ ID NO: 607 |
| 608 | PTPRC | RefSeq: NP_002829 | SEQ ID NO: 608 |
| 609 | RAB8A | UniProtKB: P61006 | SEQ ID NO: 609 |
| 610 | RAGE-1 | UniProtKB: Q9UQ07 | SEQ ID NO: 610 |
| 611 | RARA | UniProtKB: P10276 | SEQ ID NO: 611 |
| 612 | RASH | UniProtKB: P01112 | SEQ ID NO: 612 |
| 613 | RASK | UniProtKB: P01116 | SEQ ID NO: 613 |
| 614 | RASN | UniProtKB: P01111 | SEQ ID NO: 614 |
| 615 | RGS5 | UniProtKB: O15539 | SEQ ID NO: 615 |
| 616 | RHAMM/CD168 | UniProtKB: O75330 | SEQ ID NO: 616 |
| 617 | RHOC | UniProtKB: P08134 | SEQ ID NO: 617 |
| 618 | RSSA | UniProtKB: P08865 | SEQ ID NO: 618 |
| 619 | RU1 | UniProtKB: Q9UHJ3 | SEQ ID NO: 619 |
| 620 | RU2 | UniProtKB: Q9UHG0 | SEQ ID NO: 620 |
| 621 | RUNX1 | UniProtKB: Q01196 | SEQ ID NO: 621 |
| 622 | S-100 | UniProtKB: V9HW39 | SEQ ID NO: 622 |
| 623 | SAGE | UniProtKB: Q9NXZ1 | SEQ ID NO: 623 |
| 624 | SART-_1 | UniProtKB: O43290 | SEQ ID NO: 624 |
| 625 | SART-2 | UniProtKB: Q9UL01 | SEQ ID NO: 625 |
| 626 | SART-3 | UniProtKB: Q15020 | SEQ ID NO: 626 |
| 627 | SEPR | UniProtKB: Q12884 | SEQ ID NO: 627 |
| 628 | SIA7F | UniProtKB: Q969X2 | SEQ ID NO: 628 |
| 629 | SIA8A | UniProtKB: Q92185 | SEQ ID NO: 629 |
| 630 | SIAT9 | UniProtKB: Q9UNP4 | SEQ ID NO: 630 |
| 631 | SIRT2/m | UniProtKB: A0A024R0 G8 | SEQ ID NO: 631 |
| 632 | SIRT2/m | UniProtKB: Q8IXJ6 | SEQ ID NO: 632 |
| 633 | SOX10 | UniProtKB: P56693 | SEQ ID NO: 633 |
| 634 | SP17 | UniProtKB: Q15506 | SEQ ID NO: 634 |
| 635 | SPNXA | UniProtKB: Q9N526 | SEQ ID NO: 635 |
| 636 | SPXN3 | UniProtKB: Q5MJ09 | SEQ ID NO: 636 |
| 637 | SSX-1 | UniProtKB: Q16384 | SEQ ID NO: 637 |
| 638 | SSX-2 | UniProtKB: Q16385 | SEQ ID NO: 638 |
| 639 | SSX3 | UniProtKB: Q99909 | SEQ ID NO: 639 |
| 640 | SSX-4 | UniProtKB: O60224 | SEQ ID NO: 640 |
| 641 | ST1A1 | UniProtKB: P50225 | SEQ ID NO: 641 |
| 642 | STAG2 | UniProtKB: Q8N3U4-2 | SEQ ID NO: 642 |
| 643 | STAMP-1 | UniProtKB: Q8NFT2 | SEQ ID NO: 643 |
| 644 | STEAP-1 | UniProtKB: A0A024RA63 | SEQ ID NO: 644 |
| 645 | STEAP-1 | UniProtKB: Q9UHE8 | SEQ ID NO: 645 |
| 646 | Survivin-2B | UniProtKB: O15392-2 | SEQ ID NO: 646 |
| 647 | survivin | UniProtKB: O15392 | SEQ ID NO: 647 |
| 648 | SYCP1 | UniProtKB: A0A024R0I2 | SEQ ID NO: 648 |
| 649 | SYCP1 | UniProtKB: B7ZLS9 | SEQ ID NO: 649 |
| 650 | SYCP1 | UniProtKB: Q15431 | SEQ ID NO: 650 |
| 651 | SYCP1 | UniProtKB: Q3MHC4 | SEQ ID NO: 651 |
| 652 | SYT-SSX-1 | UniProtKB: A4PIV7 | SEQ ID NO: 652 |
| 653 | SYT-SSX-1 | UniProtKB: A4PIV8 | SEQ ID NO: 653 |
| 654 | SYT-SSX-2 | UniProtKB: A4PIV9 | SEQ ID NO: 654 |
| 655 | SYT-SSX-2 | UniProtKB: A4PIW0 | SEQ ID NO: 655 |
| 656 | TARP | UniProtKB: Q0VGM3 | SEQ ID NO: 656 |
| 657 | TCRg | UniProtKB: A2JGV3 | SEQ ID NO: 657 |
| 658 | TF2AA | UniProtKB: P52655 | SEQ ID NO: 658 |
| 659 | TGFR2 | UniProtKB: P37173 | SEQ ID NO: 659 |
| 660 | TGM-4 | UniProtKB: B2R7D1 | SEQ ID NO: 660 |
| 661 | TIE2 | UniProtKB: Q02763 | SEQ ID NO: 661 |
| 662 | TKTL1 | UniProtKB: P51854 | SEQ ID NO: 662 |
| 663 | TPI/m | UniProtKB: P60174 | SEQ ID NO: 663 |
| 664 | TRGV11 | UniProtKB: Q99601 | SEQ ID NO: 664 |
| 665 | TRGV9 | UniProtKB: A4D1X2 | SEQ ID NO: 665 |
| 666 | TRGV9 | UniProtKB: Q99603 | SEQ ID NO: 666 |
| 667 | TRGV9 | UniProtKB: Q99604 | SEQ ID NO: 667 |
| 668 | TRPC1 | UniProtKB: P48995 | SEQ ID NO: 668 |
| 669 | TRP-p8 | UniProtKB: Q7Z2W7 | SEQ ID NO: 669 |
| 670 | TSG10 | UniProtKB: Q9BZW7 | SEQ ID NO: 670 |
| 671 | TSPY1 | UniProtKB: Q01534 | SEQ ID NO: 671 |
| 672 | TVC_(TRGV3) | Genbank: M13231.1 | SEQ ID NO: 672 |
| 673 | TX101 | UniProtKB: Q9BY14-2 | SEQ ID NO: 673 |
| 674 | tyrosinase | UniProtKB: A0A024DBG7 | SEQ ID NO: 674 |
| 675 | tyrosinase | UniProtKB: L8B082 | SEQ ID NO: 675 |
| 676 | tyrosinase | UniProtKB: L8B086 | SEQ ID NO: 676 |
| 677 | tyrosinase | UniProtKB: L8B0B9 | SEQ ID NO: 677 |
| 678 | tyrosinase | UniProtKB: O75767 | SEQ ID NO: 678 |
| 679 | tyrosinase | UniProtKB: P14679 | SEQ ID NO: 679 |
| 680 | tyrosinase | UniProtKB: U3M8N0 | SEQ ID NO: 680 |
| 681 | tyrosinase | UniProtKB: U3M9D5 | SEQ ID NO: 681 |
| 682 | tyrosinase | UniProtKB: U3M9J2 | SEQ ID NO: 682 |
| 683 | TYRP1 | UniProtKB: P17643 | SEQ ID NO: 683 |
| 684 | TYRP2 | UniProtKB: P40126 | SEQ ID NO: 684 |
| 685 | UPA | UniProtKB: Q96NZ9 | SEQ ID NO: 685 |
| 686 | VEGFR1 | UniProtKB: B5A924 | SEQ ID NO: 686 |
| 687 | WT1 | UniProtKB: A0A0H5AUY0 | SEQ ID NO: 687 |
| 688 | WT1 | UniProtKB: P19544 | SEQ ID NO: 688 |
| 689 | WT1 | UniProtKB: Q06250 | SEQ ID NO: 689 |
| 690 | XAGE1 | UniProtKB: Q9HD64 | SEQ ID NO: 690 |
| 691 | IL-10 | UniProtKB: P22301 | SEQ ID NO: 691 |
| 692 | IL-5 | UniProtKB: P05113 | SEQ ID NO: 692 |
| 693 | M-CSF | UniProtKB: P09603 | SEQ ID NO: 693 |
| 694 | TGFbeta1 | UniProtKB: P01137 | SEQ ID NO: 694 |
| 695 | Caspase_8 | UniProtKB: Q14790 | SEQ ID NO: 695 |
| 696 | SERPINB5 | UniProtKB: P36952 | SEQ ID NO: 696 |
| 697 | calreticulin | UniProtKB: B4DHR1 | SEQ ID NO: 697 |
| 698 | calreticulin | UniProtKB: B4E2Y9 | SEQ ID NO: 698 |
| 699 | calreticulin | UniProtKB: P27797 | SEQ ID NO: 699 |
| 700 | calreticulin | UniProtKB: Q96L12 | SEQ ID NO: 700 |
| 701 | N-myc | UniProtKB: P04198 | SEQ ID NO: 701 |

[0150] Additionally, the antigens (including the sequences/fragments/epitopes shown in Column 4) described in Table 1 can be cloned into the LAMP Constructs described herein either individually, or in combination with one another. For example, the names pp65, gB, IE1, MTRII, US28, IGFBP2, IL10, UL144, UL141, US11, HOS, IE2, TERT, Survivin, Tetanus, NY-ESO-1, HER2, HER3, HVEM, HPV16E6, HPV18E6, HPV16E7, HPV18E7, EBNA1, EBNA trunc, gp350, LMP2, GCP3, Middle S, X Protein, TIGIT, TEM8, TEM1, HER2 ECD+TM, CEA, TARP, PROSTEIN, PSMA, BIRC4, MUCIN-1, MUCIN-1 iso, CD40-L, WT-1, WT-1 trunc., PRAME, LAGE-1, and/or MAGE A3 refer to the proteins described in Table 1 and are explicitly intended to refer generically not only to the full-length sequences shown in Column 1 of Table 1, but also, and preferably, the sequences/fragments/epitopes as described in FIGS. 19 and 20 and in the fourth Column of Table 1. Thus, each one of the sequences shown in Column 1 of Table 1, including the epitopes/fragments described in Column 4 of Table 1 can be used to generate a LAMP Construct. To illustrate different possible combinations, but in no way limiting the disclosure, the combinations of antigens (including the sequences shown in Column 1 of Table 1 and/or the sequences/fragments/epitopes described in Column 4 of Table 1) can be cloned into the LAMP Constructs as follows: (a) pp65 and at least one of gB, IE1, MTRII, US28, IGFBP2, IL10, UL144, UL141, US11, HOS, IE2, TERT, Survivin, Tetanus, NY-ESO-1, HER2, HER3, HVEM, HPV16E6, HPV18E6, HPV16E7, HPV18E7, EBNA1, EBNA trunc, gp350, LMP2, GCP3, Middle S, X Protein, TIGIT, TEM8, TEM1, HER2 ECD+TM, CEA, TARP, PROSTEIN, PSMA, BIRC4, MUCIN-1, MUCIN-1 iso, CD40-L, WT-1, WT-1 trunc., PRAME, LAGE-1, and/or MAGE A3; (b) gB and at least one of pp65, IE1, MTRII, US28, IGFBP2, IL10, UL144, UL141, US11, HOS, IE2, TERT, Survivin, Tetanus, NY-ESO-1, HER2, HER3, HVEM, HPV16E6, HPV18E6, HPV16E7, HPV18E7, EBNA1, EBNA trunc, gp350, LMP2, GCP3, Middle S, X Protein, TIGIT, TEM8, TEM1, HER2 ECD+TM, CEA, TARP, PROSTEIN, PSMA, BIRC4, MUCIN-1, MUCIN-1 iso, CD40-L, WT-1, WT-1 trunc., PRAME, LAGE-1, and/or MAGE A3; (c) IE1 and at least one of pp65, gB, MTRII, US28, IGFBP2, IL10, UL144, UL141, US11, HOS, IE2, TERT, Survivin, Tetanus, NY-ESO-1, HER2, HER3, HVEM, HPV16E6, HPV18E6, HPV16E7, HPV18E7, EBNA1, EBNA trunc, gp350, LMP2, GCP3, Middle S, X Protein, TIGIT, TEM8, TEM1, HER2 ECD+TM, CEA, TARP, PROSTEIN, PSMA, BIRC4, MUCIN-1, MUCIN-1 iso, CD40-L, WT-1, WT-1 trunc., PRAME, LAGE-1, and/or MAGE A3; (d) MTRII, and at least one of pp65, gB, IE1, US28, IGFBP2, IL10, UL144, UL141, US11, HOS, IE2, TERT, Survivin, Tetanus, NY-ESO-1, HER2, HER3, HVEM, HPV16E6, HPV18E6, HPV16E7, HPV18E7, EBNA1, EBNA trunc, gp350, LMP2, GCP3, Middle S, X Protein, TIGIT, TEM8, TEM1, HER2 ECD+TM, CEA, TARP, PROSTEIN, PSMA, BIRC4, MUCIN-1, MUCIN-1 iso, CD40-L, WT-1, WT-1 trunc., PRAME, LAGE-1, and/or MAGE A3; (e) US28 and at least one of pp65, gB, IE1, MTRII, IGFBP2, IL10, UL144, UL141, US11, HOS, IE2, TERT, Survivin, Tetanus, NY-ESO-1, HER2, HER3, HVEM, HPV16E6, HPV18E6, HPV16E7, HPV18E7, EBNA1, EBNA trunc, gp350, LMP2, GCP3, Middle S, X Protein, TIGIT, TEM8, TEM1, HER2 ECD+TM, CEA, TARP, PROSTEIN, PSMA, BIRC4, MUCIN-1, MUCIN-1 iso, CD40-L, WT-1, WT-1 trunc., PRAME, LAGE-1, and/or MAGE A3; (f) IGFBP2 and at least one of pp65, gB, IE1, MTRII, US28, IL10, UL144, UL141, US11, HOS, IE2, TERT, Survivin, Tetanus, NY-ESO-1, HER2, HER3, HVEM, HPV16E6, HPV18E6, HPV16E7, HPV18E7, EBNA1, EBNA trunc, gp350, LMP2, GCP3, Middle S, X Protein, TIGIT, TEM8, TEM1, HER2 ECD+TM, CEA, TARP, PROSTEIN, PSMA, BIRC4, MUCIN-1, MUCIN-1 iso, CD40-L, WT-1, WT-1 trunc., PRAME, LAGE-1, and/or MAGE A3; (g) IL10 and at least one of pp65, gB, IE1, MTRII, US28, IGFBP2, UL144, UL141, US11, HOS, IE2, TERT, Survivin, Tetanus, NY-ESO-1, HER2, HER3, HVEM, HPV16E6, HPV18E6, HPV16E7, HPV18E7, EBNA1, EBNA trunc, gp350, LMP2, GCP3, Middle S, X Protein, TIGIT, TEM8, TEM1, HER2 ECD+TM, CEA, TARP, PROSTEIN, PSMA, BIRC4, MUCIN-1, MUCIN-1 iso, CD40-L, WT-1, WT-1 trunc., PRAME, LAGE-1, and/or MAGE A3; (h) UL144 and at least one of pp65, gB, IE1, MTRII, US28, IGFBP2, IL10, UL141, US11, HOS, IE2, TERT, Survivin, Tetanus, NY-ESO-1, HER2, HER3, HVEM, HPV16E6, HPV18E6, HPV16E7, HPV18E7, EBNA1, EBNA trunc, gp350, LMP2, GCP3, Middle S, X Protein, TIGIT, TEM8, TEM1, HER2 ECD+TM, CEA, TARP, PROSTEIN, PSMA, BIRC4, MUCIN-1, MUCIN-1 iso, CD40-L, WT-1, WT-1 trunc., PRAME, LAGE-1, and/or MAGE A3; (i) UL141 and at least one of pp65, gB, IE1, MTRII, US28, IGFBP2, IL10, UL144, US11, HOS, IE2, TERT, Survivin, Tetanus, NY-ESO-1, HER2, HER3, HVEM, HPV16E6, HPV18E6, HPV16E7, HPV18E7, EBNA1, EBNA trunc, gp350, LMP2, GCP3, Middle S, X Protein, TIGIT, TEM8, TEM1, HER2 ECD+TM, CEA, TARP, PROSTEIN, PSMA, BIRC4, MUCIN-1, MUCIN-1 iso, CD40-L, WT-1, WT-1 trunc., PRAME, LAGE-1, and/or MAGE A3; (j) US11 and at least one of pp65, gB, IE1, MTRII, US28, IGFBP2, IL10, UL144, UL141, HOS, IE2, TERT, Survivin, Tetanus, NY-ESO-1, HER2, HER3, HVEM, HPV16E6, HPV18E6, HPV16E7, HPV18E7, EBNA1, EBNA trunc, gp350, LMP2, GCP3, Middle S, X Protein, TIGIT, TEM8, TEM1, HER2 ECD+TM, CEA, TARP, PROSTEIN, PSMA, BIRC4, MUCIN-1, MUCIN-1 iso, CD40-L, WT-1, WT-1 trunc., PRAME, LAGE-1, and/or MAGE A3; (k) IE2 and at least one of pp65, gB, IE1, MTRII, US28, IGFBP2, IL10, UL144, UL141, US11, HOS, TERT, Survivin, Tetanus, NY-ESO-1, HER2, HER3, HVEM, HPV16E6, HPV18E6, HPV16E7, HPV18E7, EBNA1, EBNA trunc, gp350, LMP2, GCP3, Middle S, X Protein, TIGIT, TEM8, TEM1, HER2 ECD+TM, CEA, TARP, PROSTEIN, PSMA, BIRC4, MUCIN-1, MUCIN-1 iso, CD40-L, WT-1, WT-1 trunc., PRAME, LAGE-1, and/or MAGE A3; (1) TERT and at least one of pp65, gB, IE1, MTRII, US28, IGFBP2, IL10, UL144, UL141, US11, HOS, IE2, Survivin, Tetanus, NY-ESO-1, HER2, HER3, HVEM, HPV16E6, HPV18E6, HPV16E7, HPV18E7, EBNA1, EBNA trunc, gp350, LMP2, GCP3, Middle S, X Protein, TIGIT, TEM8, TEM1, HER2 ECD+TM, CEA, TARP, PROSTEIN, PSMA, BIRC4, MUCIN-1, MUCIN-1 iso, CD40-L, WT-1, WT-1 trunc., PRAME, LAGE-1, and/or MAGE A3; (m) Survivin and at least one of pp65, gB, IE1, MTRII, US28, IGFBP2, IL10, UL144, UL141, US11, HOS, IE2, TERT, Tetanus, NY-ESO-1, HER2, HER3, HVEM, HPV16E6, HPV18E6, HPV16E7, HPV18E7, EBNA1, EBNA trunc, gp350, LMP2, GCP3, Middle S, X Protein, TIGIT, TEM8, TEM1, HER2 ECD+TM, CEA, TARP, PROSTEIN, PSMA, BIRC4, MUCIN-1, MUCIN-1 iso, CD40-L, WT-1, WT-1 trunc., PRAME, LAGE-1, and/or MAGE A3; (n) Tetanus and at least one of pp65, gB, IE1, MTRII, US28, IGFBP2, IL10, UL144, UL141, US11, HOS, IE2, TERT, Survivin, NY-ESO-1, HER2, HER3, HVEM, HPV16E6, HPV18E6, HPV16E7, HPV18E7, EBNA1, EBNA trunc, gp350, LMP2, GCP3, Middle S, X Protein, TIGIT, TEM8, TEM1, HER2 ECD+TM, CEA, TARP, PROSTEIN, PSMA, BIRC4, MUCIN-1, MUCIN-1 iso, CD40-L, WT-1, WT-1 trunc., PRAME, LAGE-1, and/or MAGE A3; (o) NY-ESO-1 and at least one of pp65, gB, IE1, MTRII, US28, IGFBP2, IL10, UL144, UL141, US11, HOS, IE2, TERT, Survivin, Tetanus, HER2, HER3, HVEM, HPV16E6, HPV18E6, HPV16E7, HPV18E7, EBNA1, EBNA trunc, gp350, LMP2, GCP3, Middle S, X Protein, TIGIT, TEM8, TEM1, HER2 ECD+TM, CEA, TARP, PROSTEIN, PSMA, BIRC4, MUCIN-1, MUCIN-1 iso, CD40-L, WT-1, WT-1 trunc., PRAME, LAGE-1, and/or MAGE A3; (p) HER2 and at least one of pp65, gB, IE1, MTRII, US28, IGFBP2, IL10, UL144, UL141, US11, HOS, IE2, TERT, Survivin, Tetanus, NY-ESO-1, HER3, HVEM, HPV16E6, HPV18E6, HPV16E7, HPV18E7, EBNA1, EBNA trunc, gp350, LMP2, GCP3, Middle S, X Protein, TIGIT, TEM8, TEM1, HER2 ECD+TM, CEA, TARP, PROSTEIN, PSMA, BIRC4, MUCIN-1, MUCIN-1 iso, CD40-L, WT-1, WT-1 trunc., PRAME, LAGE-1, and/or MAGE A3; (q) HER3 and at least one of pp65, gB, IE1, MTRII, US28, IGFBP2, IL10, UL144, UL141, US11, HOS, IE2, TERT, Survivin, Tetanus, NY-ESO-1, HER2, HVEM, HPV16E6, HPV18E6, HPV16E7, HPV18E7, EBNA1, EBNA trunc, gp350, LMP2, GCP3, Middle S, X Protein, TIGIT, TEM8, TEM1, HER2 ECD+TM, CEA, TARP, PROSTEIN, PSMA, BIRC4, MUCIN-1, MUCIN-1 iso, CD40-L, WT-1, WT-1 trunc., PRAME, LAGE-1, and/or MAGE A3; (r) HVEM and at least one of pp65, gB, IE1, MTRII, US28, IGFBP2, IL10, UL144, UL141, US11, HOS, IE2, TERT, Survivin, Tetanus, NY-ESO-1, HER2, HER3, HPV16E6, HPV18E6, HPV16E7, HPV18E7, EBNA1, EBNA trunc, gp350, LMP2, GCP3, Middle S, X Protein, TIGIT, TEM8, TEM1, HER2 ECD+TM, CEA, TARP, PROSTEIN, PSMA, BIRC4, MUCIN-1, MUCIN-1 iso, CD40-L, WT-1, WT-1 trunc., PRAME, LAGE-1, and/or MAGE A3; (s) HOS and at least one of pp65, gB, IE1, MTRII, US28, IGFBP2, IL10, UL144, UL141, US11, 1E2, TERT, Survivin, Tetanus, NY-ESO-1, HER2, HER3, HVEM, HPV16E6, HPV18E6, HPV16E7, HPV18E7, EBNA1, EBNA trunc, gp350, LMP2, GCP3, Middle S, X Protein, TIGIT, TEM8, TEM1, HER2 ECD+TM, CEA, TARP, PROSTEIN, PSMA, BIRC4, MUCIN-1, MUCIN-1 iso, CD40-L, WT-1, WT-1 trunc., PRAME, LAGE-1, and/or MAGE A3; (t) HPV16E6 and at least one of pp65, gB, IE1, MTRII, US28, IGFBP2, IL10, UL144, UL141, US11, HOS, IE2, TERT, Survivin, Tetanus, NY-ESO-1, HER2, HER3, HVEM, HPV18E6, HPV16E7, HPV18E7, EBNA1, EBNA trunc, gp350, LMP2, GCP3, Middle S, X Protein, TIGIT, TEM8, TEM1, HER2 ECD+TM, CEA, TARP, PROSTEIN, PSMA, BIRC4, MUCIN-1, MUCIN-1 iso, CD40-L, WT-1, WT-1 trunc., PRAME, LAGE-1, and/or MAGE A3; (u) HPV18E6 and at least one of pp65, gB, IE1, MTRII, US28, IGFBP2, IL10, UL144, UL141, US11, HOS, IE2, TERT, Survivin, Tetanus, NY-ESO-1, HER2, HER3, HVEM, HPV16E6, HPV16E7, HPV18E7, EBNA1, EBNA trunc, gp350, LMP2, GCP3, Middle S, X Protein, TIGIT, TEM8, TEM1, HER2 ECD+TM, CEA, TARP, PROSTEIN, PSMA, BIRC4, MUCIN-1, MUCIN-1 iso, CD40-L, WT-1, WT-1 trunc., PRAME, LAGE-1, and/or MAGE A3; (v) HPV16E7 and at least one of pp65, gB, IE1, MTRII, US28, IGFBP2, IL10, UL144, UL141, US11, HOS, IE2, TERT, Survivin, Tetanus, NY-ESO-1, HER2, HER3, HVEM, HPV16E6, HPV18E6, HPV18E7, EBNA1, EBNA trunc, gp350, LMP2, GCP3, Middle S, X Protein, TIGIT, TEM8, TEM1, HER2 ECD+TM, CEA, TARP, PROSTEIN, PSMA, BIRC4, MUCIN-1, MUCIN-1 iso, CD40-L, WT-1, WT-1 trunc., PRAME, LAGE-1, and/or MAGE A3; (w) HPV18E7 and at least one of pp65, gB, IE1, MTRII, US28, IGFBP2, IL10, UL144, UL141, US11, HOS, IE2, TERT, Survivin, Tetanus, NY-ESO-1, HER2, HER3, HVEM, HPV16E6, HPV18E6, HPV16E7, EBNA1, EBNA trunc, gp350, LMP2, GCP3, Middle S, X Protein, TIGIT, TEM8, TEM1, HER2 ECD+TM, CEA, TARP, PROSTEIN, PSMA, BIRC4, MUCIN-1, MUCIN-1 iso, CD40-L, WT-1, WT-1 trunc., PRAME, LAGE-1, and/or MAGE A3; (x) EBNA1 and at least one of pp65, gB, IE1, MTRII, US28, IGFBP2, IL10, UL144, UL141, US11, HOS, IE2, TERT, Survivin, Tetanus, NY-ESO-1, HER2, HER3, HVEM, HPV16E6, HPV18E6, HPV16E7, HPV18E7, EBNA trunc, gp350, LMP2, GCP3, Middle S, X Protein, TIGIT, TEM8, TEM1, HER2 ECD+TM, CEA, TARP, PROSTEIN, PSMA, BIRC4, MUCIN-1, MUCIN-1 iso, CD40-L, WT-1, WT-1 trunc., PRAME, LAGE-1, and/or MAGE A3; (y) EBNA1 trunc and at least one of pp65, gB, IE1, MTRII, US28, IGFBP2, IL10, UL144, UL141, US11, HOS, IE2, TERT, Survivin, Tetanus, NY-ESO-1, HER2, HER3, HVEM, HPV16E6, HPV18E6, HPV16E7, HPV18E7, EBNA1, gp350, LMP2, GCP3, Middle S, X Protein, TIGIT, TEM8, TEM1, HER2 ECD+TM, CEA, TARP, PROSTEIN, PSMA, BIRC4, MUCIN-1, MUCIN-1 iso, CD40-L, WT-1, WT-1 trunc., PRAME, LAGE-1, and/or MAGE A3; (z) gp350 and at least one of pp65, gB, IE1, MTRII, US28, IGFBP2, IL10, UL144, UL141, US11, HOS, IE2, TERT, Survivin, Tetanus, NY-ESO-1, HER2, HER3, HVEM, HPV16E6, HPV18E6, HPV16E7, HPV18E7, EBNA1, EBNA trunc, LMP2, GCP3, Middle S, X Protein, TIGIT, TEM8, TEM1, HER2 ECD+TM, CEA, TARP, PROSTEIN, PSMA, BIRC4, MUCIN-1, MUCIN-1 iso, CD40-L, WT-1, WT-1 trunc., PRAME, LAGE-1, and/or MAGE A3; (aa) LMP2 and at least one of pp65, gB, IE1, MTRII, US28, IGFBP2, IL10, UL144, UL141, US11, HOS, IE2, TERT, Survivin, Tetanus, NY-ES 0-1 , HER2, HER3, HVEM, HPV16E6, HPV18E6, HPV16E7, HPV18E7, EBNA1, EBNA trunc, gp350, GCP3, Middle S, X Protein, TIGIT, TEM8, TEM1, HER2 ECD+TM, CEA, TARP, PROSTEIN, PSMA, BIRC4, MUCIN-1, MUCIN-1 iso, CD40-L, WT-1, WT-1 trunc., PRAME, LAGE-1, and/or MAGE A3; (ab) GCP3 and at least one of pp65, gB, IE1, MTRII, US28, IGFBP2, IL10, UL144, UL141, US11, HOS, IE2, TERT, Survivin, Tetanus, NY-ESO-1, HER2, HER3, HVEM, HPV16E6, HPV18E6, HPV16E7, HPV18E7, EBNA1, EBNA trunc, gp350, LMP2, Middle S, X Protein, TIGIT, TEM8, TEM1, HER2 ECD+TM, CEA, TARP, PROSTEIN, PSMA, BIRC4, MUCIN-1, MUCIN-1 iso, CD40-L, WT-1, WT-1 trunc., PRAME, LAGE-1, and/or MAGE A3; (ac) Middle S and at least one of pp65, gB, IE1, MTRII, US28, IGFBP2, IL10, UL144, UL141, US11, HOS, IE2, TERT, Survivin, Tetanus, NY-ESO-1, HER2, HER3, HVEM, HPV16E6, HPV18E6, HPV16E7, HPV18E7, EBNA1, EBNA trunc, gp350, LMP2, GCP3, X Protein, TIGIT, TEM8, TEM1, HER2 ECD+TM, CEA, TARP, PROSTEIN, PSMA, BIRC4, MUCIN-1, MUCIN-1 iso, CD40-L, WT-1, WT-1 trunc., PRAME, LAGE-1, and/or MAGE A3; (ad) X Protein and at least one of pp65, gB, IE1, MTRII, US28, IGFBP2, IL10, UL144, UL141, US11, HOS, IE2, TERT, Survivin, Tetanus, NY-ESO-1, HER2, HER3, HVEM, HPV16E6, HPV18E6, HPV16E7, HPV18E7, EBNA1, EBNA trunc, gp350, LMP2, GCP3, Middle S, TIGIT, TEM8, TEM1, HER2 ECD+TM, CEA, TARP, PROSTEIN, PSMA, BIRC4, MUCIN-1, MUCIN-1 iso, CD40-L, WT-1, WT-1 trunc., PRAME, LAGE-1, and/or MAGE A3; (ae) TIGIT and at least one of pp65, gB, IE1, MTRII, US28, IGFBP2, IL10, UL144, UL141, US11, HOS, IE2, TERT, Survivin, Tetanus, NY-ESO-1, HER2, HER3, HVEM, HPV16E6, HPV18E6, HPV16E7, HPV18E7, EBNA1, EBNA trunc, gp350, LMP2, GCP3, Middle S, X Protein, TEM8, TEM1, HER2 ECD+TM, CEA, TARP, PROSTEIN, PSMA, BIRC4, MUCIN-1, MUCIN-1 iso, CD40-L, WT-1, WT-1 trunc., PRAME, LAGE-1, and/or MAGE A3; (af) TEM8 and at least one of pp65, gB, IE1, MTRII, US28, IGFBP2, IL10, UL144, UL141, US11, HOS, IE2, TERT, Survivin, Tetanus, NY-ES 0-1 , HER2, HER3, HVEM, HPV16E6, HPV18E6, HPV16E7, HPV18E7, EBNA1, EBNA trunc, gp350, LMP2, GCP3, Middle S, X Protein, TIGIT, TEM1, HER2 ECD+TM, CEA, TARP, PROSTEIN, PSMA, BIRC4, MUCIN-1, MUCIN-1 iso, CD40-L, WT-1, WT-1 trunc., PRAME, LAGE-1, and/or MAGE A3; (ag) TEM1 and at least one of pp65, gB, IE1, MTRII, US28, IGFBP2, IL10, UL144, UL141, US11, HOS, IE2, TERT, Survivin, Tetanus, NY-ESO-1, HER2, HER3, HVEM, HPV16E6, HPV18E6, HPV16E7, HPV18E7, EBNA1, EBNA trunc, gp350, LMP2, GCP3, Middle S, X Protein, TIGIT, TEM8, HER2 ECD+TM, CEA, TARP, PROSTEIN, PSMA, BIRC4, MUCIN-1, MUCIN-1 iso, CD40-L, WT-1, WT-1 trunc., PRAME, LAGE-1, and/or MAGE A3; (ah) HER2 ECD+TM and at least one of pp65, gB, IE1, MTRII, US28, IGFBP2, IL10, UL144, UL141, US11, HOS, IE2, TERT, Survivin, Tetanus, NY-ESO-1, HER2, HER3, HVEM, HPV16E6, HPV18E6, HPV16E7, HPV18E7, EBNA1, EBNA trunc, gp350, LMP2, GCP3, Middle S, X Protein, TIGIT, TEM8, TEM1, CEA, TARP, PROSTEIN, PSMA, BIRC4, MUCIN-1, MUCIN-1 iso, CD40-L, WT-1, WT-1 trunc., PRAME, LAGE-1, and/or MAGE A3; (ai) CEA and at least one of pp65, gB, IE1, MTRII, US28, IGFBP2, IL10, UL144, UL141, US11, HOS, IE2, TERT, Survivin, Tetanus, NY-ESO-1, HER2, HER3, HVEM, HPV16E6, HPV18E6, HPV16E7, HPV18E7, EBNA1, EBNA trunc, gp350, LMP2, GCP3, Middle S, X Protein, TIGIT, TEM8, TEM1, HER2 ECD+TM, TARP, PROSTEIN, PSMA, BIRC4, MUCIN-1, MUCIN-1 iso, CD40-L, WT-1, WT-1 trunc., PRAME, LAGE-1, and/or MAGE A3; (aj) TARP and at least one of pp65, gB, IE1, MTRII, US28, IGFBP2, IL10, UL144, UL141, US11, HOS, IE2, TERT, Survivin, Tetanus, NY-ESO-1, HER2, HER3, HVEM, HPV16E6, HPV18E6, HPV16E7, HPV18E7, EBNA1, EBNA trunc, gp350, LMP2, GCP3, Middle S, X Protein, TIGIT, TEM8, TEM1, HER2 ECD+TM, CEA, PROSTEIN, PSMA, BIRC4, MUCIN-1, MUCIN-1 iso, CD40-L, WT-1, WT-1 trunc., PRAME, LAGE-1, and/or MAGE A3; (ak) PROSTEIN and at least one of pp65, gB, IE1, MTRII, US28, IGFBP2, IL10, UL144, UL141, US11, HOS, IE2, TERT, Survivin, Tetanus, NY-ESO-1, HER2, HER3, HVEM, HPV16E6, HPV18E6, HPV16E7, HPV18E7, EBNA1, EBNA trunc, gp350, LMP2, GCP3, Middle S, X Protein, TIGIT, TEM8, TEM1, HER2 ECD+TM, CEA, TARP, PSMA, BIRC4, MUCIN-1, MUCIN-1 iso, CD40-L, WT-1, WT-1 trunc., PRAME, LAGE-1, and/or MAGE A3; (al) PSMA and at least one of pp65, gB, IE1, MTRII, US28, IGFBP2, IL10, UL144, UL141, US11, HOS, IE2, TERT, Survivin, Tetanus, NY-ESO-1, HER2, HER3, HVEM, HPV16E6, HPV18E6, HPV16E7, HPV18E7, EBNA1, EBNA trunc, gp350, LMP2, GCP3, Middle S, X Protein, TIGIT, TEM8, TEM1, HER2 ECD+TM, CEA, TARP, PROSTEIN, BIRC4, MUCIN-1, MUCIN-1 iso, CD40-L, WT-1, WT-1 trunc., PRAME, LAGE-1, and/or MAGE A3; (am) BIRC4 and at least one of pp65, gB, IE1, MTRII, US28, IGFBP2, IL10, UL144, UL141, US11, HOS, IE2, TERT, Survivin, Tetanus, NY-ESO-1, HER2, HER3, HVEM, HPV16E6, HPV18E6, HPV16E7, HPV18E7, EBNA1, EBNA trunc, gp350, LMP2, GCP3, Middle S, X Protein, TIGIT, TEM8, TEM1, HER2 ECD+TM, CEA, TARP, PROSTEIN, PSMA, MUCIN-1, MUCIN-1 iso, CD40-L, WT-1, WT-1 trunc., PRAME, LAGE-1, and/or MAGE A3; (an) MUCIN-1 and at least one of pp65, gB, IE1, MTRII, US28, IGFBP2, IL10, UL144, UL141, US11, HOS, IE2, TERT, Survivin, Tetanus, NY-ESO-1, HER2, HER3, HVEM, HPV16E6, HPV18E6, HPV16E7, HPV18E7, EBNA1, EBNA trunc, gp350, LMP2, GCP3, Middle S, X Protein, TIGIT, TEM8, TEM1, HER2 ECD+TM, CEA, TARP, PROSTEIN, PSMA, BIRC4, MUCIN-1 iso, CD40-L, WT-1, WT-1 trunc., PRAME, LAGE-1, and/or MAGE A3; (ao) MUCIN-1 iso and at least one of pp65, gB, IE1, MTRII, US28, IGFBP2, IL10, UL144, UL141, US11, HOS, IE2, TERT, Survivin, Tetanus, NY-ESO-1, HER2, HER3, HVEM, HPV16E6, HPV18E6, HPV16E7, HPV18E7, EBNA1, EBNA trunc, gp350, LMP2, GCP3, Middle S, X Protein, TIGIT, TEM8, TEM1, HER2 ECD+TM, CEA, TARP, PROSTEIN, PSMA, BIRC4, MUCIN-1, CD40-L, WT-1, WT-1 trunc., PRAME, LAGE-1, and/or MAGE A3; (ap) CD40-L and at least one of pp65, gB, IE1, MTRII, US28, IGFBP2, IL10, UL144, UL141, US11, HOS, IE2, TERT, Survivin, Tetanus, NY-ESO-1, HER2, HER3, HVEM, HPV16E6, HPV18E6, HPV16E7, HPV18E7, EBNA1, EBNA trunc, gp350, LMP2, GCP3, Middle S, X Protein, TIGIT, TEM8, TEM1, HER2 ECD+TM, CEA, TARP, PROSTEIN, PSMA, BIRC4, MUCIN-1, MUCIN-1 iso, WT-1, WT-1 trunc., PRAME, LAGE-1, and/or MAGE A3; (aq) WT-1 and at least one of pp65, gB, IE1, MTRII, US28, IGFBP2, IL10, UL144, UL141, US11, HOS, IE2, TERT, Survivin, Tetanus, NY-ESO-1, HER2, HER3, HVEM, HPV16E6, HPV18E6, HPV16E7, HPV18E7, EBNA1, EBNA trunc, gp350, LMP2, GCP3, Middle S, X Protein, TIGIT, TEM8, TEM1, HER2 ECD+TM, CEA, TARP, PROSTEIN, PSMA, BIRC4, MUCIN-1, MUCIN-1 iso, CD40-L, WT-1 trunc., PRAME, LAGE-1, and/or MAGE A3; (ar) WT-1 trunc and at least one of pp65, gB, IE1, MTRII, US28, IGFBP2, IL10, UL144, UL141, US11, HOS, IE2, TERT, Survivin, Tetanus, NY-ESO-1, HER2, HER3, HVEM, HPV16E6, HPV18E6, HPV16E7, HPV18E7, EBNA1, EBNA trunc, gp350, LMP2, GCP3, Middle S, X Protein, TIGIT, TEM8, TEM1, HER2 ECD+TM, CEA, TARP, PROSTEIN, PSMA, BIRC4, MUCIN-1, MUCIN-1 iso, CD40-L, WT-1, PRAME, LAGE-1, and/or MAGE A3; (as) PRAME and at least one of pp65, gB, IE1, MTRII, US28, IGFBP2, IL10, UL144, UL141, US11, HOS, IE2, TERT, Survivin, Tetanus, NY-ES 0-1 , HER2, HER3, HVEM, HPV16E6, HPV18E6, HPV16E7, HPV18E7, EBNA1, EBNA trunc, gp350, LMP2, GCP3, Middle S, X Protein, TIGIT, TEM8, TEM1, HER2 ECD+TM, CEA, TARP, PROSTEIN, PSMA, BIRC4, MUCIN-1, MUCIN-1 iso, CD40-L, WT-1, WT-1 trunc., LAGE-1, and/or MAGE A3; (at) LAGE-1 and at least one of pp65, gB, IE1, MTRII, US28, IGFBP2, IL10, UL144, UL141, US11, HOS, IE2, TERT, Survivin, Tetanus, NY-ESO-1, HER2, HER3, HVEM, HPV16E6, HPV18E6, HPV16E7, HPV18E7, EBNA1, EBNA trunc, gp350, LMP2, GCP3, Middle S, X Protein, TIGIT, TEM8, TEM1, HER2 ECD+TM, CEA, TARP, PROSTEIN, PSMA, BIRC4, MUCIN-1, MUCIN-1 iso, CD40-L, WT-1, WT-1 trunc., PRAME, and/or MAGE A3; and/or (au) MAGE A3 and at least one of pp65, gB, IE1, MTRII, US28, IGFBP2, IL10, UL144, UL141, US11, HOS, IE2, TERT, Survivin, Tetanus, NY-ESO-1, HER2, HER3, HVEM, HPV16E6, HPV18E6, HPV16E7, HPV18E7, EBNA1, EBNA trunc, gp350, LMP2, GCP3, Middle S, X Protein, TIGIT, TEM8, TEM1, HER2 ECD+TM, CEA, TARP, PROSTEIN, PSMA, BIRC4, MUCIN-1, MUCIN-1 iso, CD40-L, WT-1, WT-1 trunc., PRAME, and/or LAGE-1. The order of the combination of antigens as described above in a particular LAMP construct can vary as this list describes what a LAMP Construct comprises and not necessarily to describe the arrangement of the antigens within a particular construct. Moreover, it is specifically envisioned that these antigens can be combined within a single LAMP Construct, or can be delivered in a composition comprising multiple LAMP Constructs.

### Assembly of Sequences Encoding Improved LAMP Constructs

[0151] Procedures for constructing improved LAMP Constructs comprising the antigen of interest are well known in the art (see e.g., Williams, et al., J. Cell Biol. 111: 955, 1990). DNA sequences encoding the desired segments can be obtained from readily available recombinant DNA materials such as those available from the American Type Culture Collection, 12301 Parklawn Drive, Rockville, Md. 20852, U.S.A., or from DNA libraries that contain the desired DNA.

[0152] For example, the DNA segments corresponding to the desired domain sequences can be assembled with appropriate control and signal sequences using routine procedures of recombinant DNA methodology. See, e.g., as described in U.S. Pat. No. 4,593,002, and Langford, et al., Molec. Cell. Biol. 6: 3191, 1986.

[0153] A DNA sequence encoding a protein or polypeptide can be synthesized chemically or isolated by one of several approaches. The DNA sequence to be synthesized can be designed with the appropriate codons for the desired amino acid sequence. In general, one will select preferred codons for the intended host in which the sequence will be used for expression. The complete sequence may be assembled from overlapping oligonucleotides prepared by standard methods and assembled into a complete coding sequence. See, e.g., Edge, Nature 292: 756, 1981; Nambair, et al. Science 223: 1299, 1984; Jay, et al., J. Biol. Chem. 259: 6311, 1984.

[0154] In one aspect, one or more of the nucleic acids encoding the domain sequences of the improved LAMP Construct are isolated individually using the polymerase chain reaction (M. A. Innis, et al., In PCR Protocols: A Guide to Methods and Applications, Academic Press, 1990). The domains are preferably isolated from publicly available clones known to contain them, but they may also be isolated from genomic DNA or cDNA libraries. Preferably, isolated fragments are bordered by compatible restriction endonuclease sites which allow an improved LAMP Construct encoding the cancer antigen sequence to be constructed. This technique is well known to those of skill in the art. Domain sequences may be fused directly to each other (e.g., with no intervening sequences), or inserted into one another (e.g., where domain sequences are discontinuous), or may be separated by intervening sequences (e.g., such as linker sequences).

[0155] The basic strategies for preparing oligonucleotide primers, probes and DNA libraries, as well as their screening by nucleic acid hybridization, are well known to those of ordinary skill in the art. See, e.g., Sambrook, et al., 1989, supra; Perbal, 1984, supra. The construction of an appropriate genomic DNA or cDNA library is within the skill of the art. See, e.g., Perbal, 1984, supra. Alternatively, suitable DNA libraries or publicly available clones are available from suppliers of biological research materials, such as Clonetech and Stratagene, as well as from public depositories such as the American Type Culture Collection.

[0156] Selection may be accomplished by expressing sequences from an expression library of DNA and detecting the expressed peptides immunologically. Clones which express peptides that bind to MHC II molecules and to the desired antibodies/T cell receptors are selected. These selection procedures are well known to those of ordinary skill in the art (see, e.g., Sambrook, et al., 1989, supra).

[0157] Once a clone containing the coding sequence for the desired polypeptide sequence has been prepared or isolated, the sequence can be cloned into any suitable vector, preferably comprising an origin of replication for maintaining the sequence in a host cell.

### Nucleic Acid Delivery Vehicles

[0158] In one aspect, a vaccine composition comprising an improved LAMP Construct is introduced into a cell. The cell may be a host cell for replicating the nucleic acid or for expressing the improved LAMP Construct. Preferably, the host cell for expressing the improved LAMP Construct is an antigen presenting cell (described further below).

[0159] In preferred embodiments, the improved LAMP Construct further comprises a polynucleotide sequence for insertion into a target cell and an expression control sequence operably linked thereto to control expression of the polynucleotide sequence (e.g., transcription and/or translation) in the cell. Examples include plasmids, phages, autonomously replicating sequences (ARS), centromeres, and other sequences which are able to replicate or be replicated in vitro or in a host cell (e.g., such as a bacterial, yeast, or insect cell) and/or target cell (e.g., such as a mammalian cell, preferably an antigen presenting cell) and/or to convey the sequences encoding the improved LAMP Construct to a desired location within the target cell.

[0160] Recombinant expression vectors may be derived from micro-organisms which readily infect animals, including man, horses, cows, pigs, llamas, giraffes, dogs, cats or chickens. Preferred vectors include those which have already been used as live vaccines, such as vaccinia. These recombinants can be directly inoculated into a host, conferring immunity not only to the microbial vector, but also to express foreign antigens. Preferred vectors contemplated herein as live recombinant vaccines include RNA viruses, adenovirus, herpesviruses, poliovirus, and vaccinia and other pox viruses, as taught in Flexner, Adv. Pharmacol. 21: 51, 1990, for example.

[0161] Expression control sequences include, but are not limited to, promoter sequences to bind RNA polymerase, enhancer sequences or negative regulatory elements to bind to transcriptional activators and repressors, respectively, and/or translation initiation sequences for ribosome binding. For example, a bacterial expression vector can include a promoter such as the lac promoter and for transcription initiation, the Shine-Dalgarno sequence and the start codon AUG (Sambrook, et al., 1989, supra). Similarly, a eukaryotic expression vector preferably includes a heterologous, homologous, or chimeric promoter for RNA polymerase II, a downstream polyadenylation signal, the start codon AUG, and a termination codon for detachment of a ribosome.

[0162] Expression control sequences may be obtained from naturally occurring genes or may be designed. Designed expression control sequences include, but are not limited to, mutated and/or chimeric expression control sequences or synthetic or cloned consensus sequences. Vectors that contain both a promoter and a cloning site into which a polynucleotide can be operatively linked are well known in the art. Such vectors are capable of transcribing RNA in vitro or in vivo, and are commercially available from sources such as Stratagene (La Jolla, Calif.) and Promega Biotech (Madison, Wis.).

[0163] In order to optimize expression and/or transcription, it may be necessary to remove, add or alter 5′ and/or 3′ untranslated portions of the vectors to eliminate extra, or alternative translation initiation codons or other sequences that may interfere with, or reduce, expression, either at the level of transcription or translation. Alternatively, consensus ribosome binding sites can be inserted immediately 5′ of the start codon to enhance expression. A wide variety of expression control sequences—sequences that control the expression of a DNA sequence operatively linked to it—may be used in these vectors to express the DNA sequences of this invention. Such useful expression control sequences include, for example, the early or late promoters of SV40, CMV, vaccinia, polyoma, adenovirus, herpes virus and other sequences known to control the expression of genes of mammalian cells, and various combinations thereof.

[0164] In one aspect, the improved LAMP Construct comprises an origin of replication for replicating the vector. Preferably, the origin functions in at least one type of host cell which can be used to generate sufficient numbers of copies of the sequence for use in delivery to a target cell. Suitable origins therefore include, but are not limited to, those which function in bacterial cells (e.g., such as Escherichia sp., Salmonella sp., Proteus sp., Clostridium sp., Klebsiella sp., Bacillus sp., Streptomyces sp., and Pseudomonas sp.), yeast (e.g., such as Saccharamyces sp. or Pichia sp.), insect cells, and mammalian cells. In one preferred aspect, an origin of replication is provided which functions in the target cell into which the nucleic acid delivery vehicle is introduced (e.g., a mammalian cell, such as a human cell). In another aspect, at least two origins of replication are provided, one that functions in a host cell and one that functions in a target cell.

[0165] The improved LAMP Construct may alternatively, or additionally, comprise sequences to facilitate integration of at least a portion of the nucleic acid deliver vector into a target cell chromosome. For example, the improved LAMP Construct may comprise regions of homology to target cell chromosomal DNA. In one aspect, the delivery vector comprises two or more recombination sites which flank a nucleic acid sequence encoding the improved LAMP Construct.

[0166] The vector may additionally comprise a detectable and/or selectable marker to verify that the vector has been successfully introduced in a target cell and/or can be expressed by the target cell. These markers can encode an activity, such as, but not limited to, production of RNA, peptide, or protein, or can provide a binding site for RNA, peptides, proteins, inorganic and organic compounds or compositions and the like.

[0167] Examples of detectable/selectable markers genes include, but are not limited to: DNA segments that encode products which provide resistance against otherwise toxic compounds (e.g., antibiotics); DNA segments that encode products which are otherwise lacking in the recipient cell (e.g., tRNA genes, auxotrophic markers); DNA segments that encode products which suppress the activity of a gene product; DNA segments that encode products which can be readily identified (e.g., phenotypic markers such as beta-galactosidase, a fluorescent protein (GFP, CFP, YFG, BFP, RFP, EGFP, EYFP, EBFP, dsRed, mutated, modified, or enhanced forms thereof, and the like), and cell surface proteins); DNA segments that bind products which are otherwise detrimental to cell survival and/or function; DNA segments that otherwise inhibit the activity of other nucleic acid segments (e.g., antisense oligonucleotides); DNA segments that bind products that modify a substrate (e.g., restriction endonucleases); DNA segments that can be used to isolate or identify a desired molecule (e.g., segments encoding specific protein binding sites); primer sequences; DNA segments, which when absent, directly or indirectly confer resistance or sensitivity to particular compounds; and/or DNA segments that encode products which are toxic in recipient cells.

[0168] The marker gene can be used as a marker for conformation of successful gene transfer and/or to isolate cells expressing transferred genes and/or to recover transferred genes from a cell. For example, in one aspect, the marker gene is used to isolate and purify antigen presenting cells expressing the improved LAMP Constructs.

[0169] Substantially similar genes may be provided, e.g., genes with greater than about 50%, greater than about 70%, greater than 80%, greater than about 90%, and preferably, greater than about 95% identity to a known gene. Substantially similar domain sequences may initially be identified by selecting a sequence which specifically hybridizes to a domain sequence of interest under stringent hybridization conditions. Performing assays to determine the suitability of homologous, variant, or modified domain sequences is merely a matter of screening for sequences which express the appropriate activity. Such screening is routine in the art.

[0170] The improved LAMP Construct may be provided as naked nucleic acids or in a delivery vehicle associated with one or more molecules for facilitating entry of a nucleic acid into a cell. Suitable delivery vehicles include, but are not limited to: liposomal formulations, polypeptides, polysaccharides, lipopolysaccharides, viral formulations (e.g., including viruses, viral particles, artificial viral envelopes and the like), cell delivery vehicles, and the like.

### Lipid-Based Formulations

[0171] Delivery vehicles designed to facilitate intracellular delivery of the improved LAMP Constructs must interact with both non-polar and polar environments (in or on, for example, the plasma membrane, tissue fluids, compartments within the cell, and the like). Therefore, preferably, delivery vehicles are designed to contain both polar and non-polar domains or a translocating sequence for translocating an improved LAMP Construct into a cell.

[0172] Compounds having polar and non-polar domains are termed amphiphiles. Cationic amphiphiles have polar groups that are capable of being positively charged at, or around, physiological pH for interacting with negatively charged polynucleotides such as DNA.

[0173] The improved LAMP Constructs described herein can be provided in formulations comprising lipid monolayers or bilayers to facilitate transfer of the vectors across a cell membrane. Liposomes or any form of lipid membrane, such as planar lipid membranes or the cell membrane of an intact cell, e.g., a red blood cell, can be used. Liposomal formulations can be administered by any means, including administration intravenously or orally.

[0174] Liposomes and liposomal formulations can be prepared according to standard methods and are well known in the art, see, e.g., Remington's; Akimaru, 1995, Cytokines Mol. Ther. 1: 197-210; Alving, 1995, Immunol. Rev. 145: 5-31; Szoka, 1980, Ann. Rev. Biophys. Bioeng. 9: 467; U.S. Pat. Nos. 4,235,871; 4,501,728; and 4,837,028. In one aspect, the liposome comprises a targeting molecule for targeting a liposome:improved LAMP Construct complex to a particular cell type. In a particularly preferred aspect, a targeting molecule comprises a binding partner (e.g., a ligand or receptor) for a biomolecule (e.g., a receptor or ligand) on the surface of a blood vessel or a cell found in a target tissue.

[0175] Liposome charge is an important determinant in liposome clearance from the blood, with negatively charged liposomes being taken up more rapidly by the reticuloendothelial system (Juliano, 1975, Biochem. Biophys. Res. Commun. 63: 651) and thus having shorter half-lives in the bloodstream. Incorporating phosphatidylethanolamine derivatives enhances the circulation time by preventing liposomal aggregation. For example, incorporation of N-(omega-carboxy)acylamidophosphatidylethanolamines into large unilamellar vesicles of L-alpha-distearoylphosphatidylcholine dramatically increases the in vivo liposomal circulation lifetime (see, e.g., Ahl, 1997, Biochim. Biophys. Acta 1329: 370-382). Liposomes with prolonged circulation half-lives are typically desirable for therapeutic and diagnostic uses. For a general discussion of pharmacokinetics, see, e.g., Remington's, Chapters 37-39, Lee, et al., In Pharmacokinetic Analysis: A Practical Approach (Technomic Publishing AG, Basel, Switzerland 1996).

[0176] Typically, liposomes are prepared with about 5 to 15 mole percent negatively charged phospholipids, such as phosphatidylglycerol, phosphatidylserine or phosphatidyl-inositol. Added negatively charged phospholipids, such as phosphatidylglycerol, also serve to prevent spontaneous liposome aggregation, and thus minimize the risk of undersized liposomal aggregate formation. Membrane-rigidifying agents, such as sphingomyelin or a saturated neutral phospholipid, at a concentration of at least about 50 mole percent, and 5 to 15 mole percent of monosialylganglioside can also impart desirably liposome properties, such as rigidity (see, e.g., U.S. Pat. No. 4,837,028).

[0177] Additionally, the liposome suspension can include lipid-protective agents which protect lipids against free-radical and lipid-peroxidative damages on storage. Lipophilic free-radical quenchers, such as alpha-tocopherol and water-soluble iron-specific chelators, such as ferrioxianine, are preferred.

[0178] The improved LAMP Constructs of the invention can include multilamellar vesicles of heterogeneous sizes. For example, vesicle-forming lipids can be dissolved in a suitable organic solvent or solvent system and dried under vacuum or an inert gas to form a thin lipid film. If desired, the film can be redissolved in a suitable solvent, such as tertiary butanol, and then lyophilized to form a more homogeneous lipid mixture which is in a more easily hydrated powderlike form. This film is covered with an aqueous solution of the peptide or polypeptide complex and allowed to hydrate, typically over a 15 to 60 minute period with agitation. The size distribution of the resulting multilamellar vesicles can be shifted toward smaller sizes by hydrating the lipids under more vigorous agitation conditions or by adding solubilizing detergents such as deoxycholate. The hydration medium preferably comprises the nucleic acid at a concentration which is desired in the interior volume of the liposomes in the final liposome suspension.

[0179] Following liposome preparation, the liposomes can be sized to achieve a desired size range and relatively narrow distribution of liposome sizes. One preferred size range is about 0.2 to 0.4 microns, which allows the liposome suspension to be sterilized by filtration through a conventional filter, typically a 0.22 micron filter. Filter sterilization can be carried out on a high throughput basis if the liposomes have been sized down to about 0.2 to 0.4 microns. Several techniques are available for sizing liposome to a desired size (see, e.g., U.S. Pat. No. 4,737,323).

[0180] Suitable lipids include, but are not limited to, DOTMA (Felgner, et al., 1987, Proc. Natl. Acad. Sci. USA 84: 7413-7417), DOGS or Transfectain™ (Behr, et al., 1989, Proc. Natl. Acad. Sci. USA 86: 6982-6986), DNERIE or DORIE (Felgner, et al., Methods 5: 67-75), DC-CHOL (Gao and Huang, 1991, BBRC 179: 280-285), DOTAP™ (McLachlan, et al., 1995, Gene Therapy 2: 674-622), Lipofectamine™ and glycerolipid compounds (see, e.g., EP901463 and WO98/37916).

[0181] Other molecules suitable for complexing with the improved LAMP Constructs include cationic molecules, such as, polyamidoamine (Haensler and Szoka, 1993, Bioconjugate Chem. 4: 372-379), dendritic polysine (WO 95/24221), polyethylene irinine or polypropylene h-nine (WO 96/02655), polylysine (U.S. Pat. No. 5,595,897; FR 2 719 316), chitosan (U.S. Pat. No. 5,744,166), DNA-gelatin coarcervates (see, e.g., U.S. Pat. Nos. 6,207,195; 6,025,337; 5,972,707) or DEAE dextran (Lopata, et al., 1984, Nucleic Acid Res. 12: 5707-5717).

### Viral-Based Gene Delivery Vehicles

[0182] In one aspect, the improved LAMP Construct delivery vehicle comprises a virus or viral particle. In this aspect, preferably, the improved LAMP Construct comprises a viral vector. Viral vectors, such as retroviruses, adenoviruses, adeno-associated viruses and herpes viruses, are often made up of two components, a modified viral genome and a coat structure surrounding it (see, e.g., Smith et al., 1995, Ann. Rev. Microbiol. 49: 807-838), although sometimes viral vectors are introduced in naked form or coated with proteins other than viral proteins. Most current vectors have coat structures similar to a wild-type virus. This structure packages and protects the viral nucleic acid and provides the means to bind and enter target cells.

[0183] Preferably, viral vectors comprising the improved LAMP Constructs described herein are modified from wild-type viral genomes to disable the growth of the virus in a target cell while enabling the virus to grow in a host cell (e.g., such as a packaging or helper cell) used to prepare infectious particles. Vector nucleic acids generally essential cis-acting viral sequences for replication and packaging in a helper line and expression control sequences for regulating the expression of a polynucleotide being delivered to a target cell. Other viral functions are expressed in trans in specific packaging or helper cell lines as are known in the art.

[0184] Preferred improved LAMP Constructs are viral vectors derived from a virus selected from the group consisting of herpes viruses, cytomegaloviruses, foamy viruses, lentiviruses, Semliki forrest virus, AAV (adeno-associated virus), poxviruses, adenovirases and retroviruses. Such viral vectors are well known in the art.

[0185] In one preferred aspect, a viral vector used is an adenoviral vector. The adenoviral genome consists of a linear double-stranded DNA molecule of approximately 36 kb carrying more than about thirty genes necessary to complete the viral replication cycle. The early genes are divided into 4 regions (E1 to E4) that are essential for viral replication with the exception of the E3 region, which is believed to modulate the anti-viral host immune response. The E1 region (EIA and EIB) encodes proteins responsible for the regulation of transcription of the viral genome. Expression of the E2 region genes (E2A and E2B) leads to the synthesis of the polypeptides needed for viral replication. The proteins encoded by the E3 region prevent cytolysis by cytotoxic T cells and tumor necrosis factor (Wold and Gooding, 1991, Virology 184: 1-8). The proteins encoded by the E4 region are involved in DNA replication, late gene expression and splicing and host cell shut off (Halbert, et al., 1985, J. Virol. 56: 250-257). The late genes generally encode structural proteins contributing to the viral capsid. In addition, the adenoviral genome carries at cis-acting 5′ and 3′ ITRs (Inverted Terminal Repeat) and packaging sequences essential for DNA replication. The ITRs harbor origins of DNA replication while the encapsidation region is required for the packaging of adenoviral DNA into infectious particles.

[0186] Adenoviral vectors can be engineered to be conditionally replicative (CRAd vectors) in order to replicate selectively in specific cells (e.g., such as proliferative cells) as described in Heise and Kim (2000, J. Clin. Invest. 105: 847-851). In another aspect, an adenoviral vector is replication-defective for the E1 function (e.g., by total or partial deletion or mutagenesis of E1). The adenoviral backbone of the vector may comprise additional modifications (deletions, insertions or mutations in one or more viral genes). An example of an E2 modification is illustrated by the thermosensitive mutation localized on the DBP (DNA Binding Protein) encoding gene (Ensinger et al., 1972, J. Virol. 10: 328-339). The adenoviral sequence may also be deleted of all or part of the E4 region (see, e.g., EP 974 668; Christ, et al., 2000, Human Gene Ther. 11: 415-427; Lusky, et al., 1999, J. Virol. 73: 8308-8319). Additional deletions within the non-essential E3 region may allow the size of the polynucleotide being delivered to be increased (Yeh, et al., 1997, FASEB Journal 11: 615 623). However, it may be advantageous to retain all or part of the E3 sequences coding for polypeptides (e.g., such as gp19k) allowing the virus to escape the immune system (Gooding, et al., 1990, Critical Review of Immunology 10: 53-71) or inflammatory reactions (EP 00440267.3).

[0187] Second generation vectors retaining the ITRs and packaging sequences and comprising substantial genetic modifications to abolish the residual synthesis of the viral antigens also may be used in order to improve long-term expression of the expressed gene in the transduced cells (see, e.g., WO 94/28152; Lusky, et al., 1998, J. Virol 72: 2022-2032).

[0188] The improved LAMP Constructs being introduced into the cell may be inserted in any location of the viral genome, with the exception of the cis-acting sequences. Preferably, it is inserted in replacement of a deleted region (E1, E3 and/or E4), preferably, within a deleted E1 region.

[0189] Adenoviruses can be derived from any human or animal source, in particular canine (e.g. CAV-1 or CAV-2 Genbank ref. CAVIGENOM and CAV77082, respectively), avian (Genbank ref. AAVEDSDNA), bovine (such as BAV3; Reddy, et al., 1998, J. Virol. 72: 1394 1402), murine (Genbank ref. ADRMUSMAVI), ovine, feline, porcine or simian sources or alternatively, may be a hybrid virus. Any serotype can be employed. However, the human adenoviruses of the C sub-group are preferred, especially adenoviruses 2 (Ad2) and 5 (Ad5). Such viruses are available, for example, from the ATCC.

[0190] Adenoviral particles or empty adenoviral capsids also can be used to transfer improved LAMP Constructs by a virus-mediated cointernalization process as described in U.S. Pat. No. 5,928,944. This process can be accomplished in the presence of cationic agent(s) such as polycarbenes or lipid vesicles comprising one or more lipid layers.

[0191] Adenoviral particles may be prepared and propagated according to any conventional technique in the field of the art (e.g., WO 96/17070) using a complementation cell line or a helper virus, which supplies in trans the missing viral genes necessary for viral replication. The cell lines 293 (Graham et al., 1977, J. Gen. Virol. 36: 59-72) and PERC6 (Fallaux et al., 1998, Human Gene Therapy 9: 1909-1917) are commonly used to complement El deletions. Other cell lines have been engineered to complement defective vectors (Yeh, et at, 1996, J. Virol. 70: 559-565; Kroughak and Graham, 1995, Human Gene Ther. 6: 1575-1586; Wang, et al., 1995, Gene Ther. 2: 775-783; Lusky, et al., 1998, J. Virol. 72: 2022-203; EP 919627 and WO 97/04119). The adenoviral particles can be recovered from the culture supernatant but also from the cells after lysis and optionally further purified according to standard techniques (e.g., chromatography, ultracentrifugation, as described in WO 96/27677, WO 98/00524 WO 98/26048 and WO 00/50573).

[0192] Cell-type specific targeting may be achieved with vectors derived from adenoviruses having a broad host range by the modification of viral surface proteins. For example, the specificity of infection of adenoviruses is determined by the attachment to cellular receptors present at the surface of permissive cells. In this regard, the fiber and penton present at the surface of the adenoviral capsid play a critical role in cellular attachment (Defer, et al., 1990, J. Virol. 64: 3661-3673). Thus, cell targeting of adenoviruses can be carried out by genetic modification of the viral gene encoding fiber and/or penton, to generate modified fiber and/or penton capable of specific interaction with unique cell surface receptors. Examples of such modifications are described in Wickarn, et al., 1997, J. Virol. 71: 8221-8229; Arriberg, et al., 1997, Virol. Chem 268: 6866-6869; Roux, et al., 1989, Proc. Natl. Acad. Sci. USA 86: 9079-9083; Miller and Vile, 1995, FASEB J. 9: 190-199; WO 93/09221, and in WO 95/28494.

[0193] In a particularly preferred aspect, adeno-associated viral sequences are used as vectors. Vectors derived from the human parvovirus AAV-2 (adeno-associated virus type 2) are among the most promising gene delivery vehicles currently being developed. Several of the features of this system for packaging a single-stranded DNA suggest it as a possible alternative to naked DNA for delivery. A primary attractive feature, in contrast to other viral vectors such as vaccinia or adenovirus, is that AAV vectors do not express any viral genes. The only viral DNA sequences included in the vaccine construct are the 145 bp inverted terminal repeats (ITR). Thus, as in immunization with naked DNA, the only gene expressed is that of the antigen, or antigen chimera. Additionally, AAV vectors are known to transduce both dividing and non-dividing cells, such as human peripheral blood monocyte-derived dendritic cells, with persistent transgene expression, and with the possibility of oral and intranasal delivery for generation of mucosal immunity. Moreover, the amount of DNA required appears to be much less by several orders of magnitude, with maximum responses at doses of 10¹⁰ to 10¹¹ particles or copies of DNA in contrast to naked DNA doses of 50 ug or about 10¹⁵ copies.

[0194] In one aspect, AAV vectors are packaged by co-transfection of a suitable cell line (e.g., human 293 cells) with the DNA contained in the AAV ITR chimeric protein encoding constructs and an AAV helper plasmid ACG2 containing the AAV coding region (AAV rep and cap genes) without the ITRs. The cells are subsequently infected with the adenovirus AdS. Vectors can be purified from cell lysates using methods known in the art (e.g., such as cesium chloride density gradient ultracentrifugation) and are validated to ensure that they are free of detectable replication-competent AAV or adenovirus (e.g., by a cytopathic effect bioassay). AAV titer may be determined by quantitative PCR with virus DNA samples prepared after digestion with proteinase K. Preferably, vector titers produced by such a method are approximately 5×10¹² to 1×10¹³ DNase resistant particles per ml.

[0195] In other aspects, retroviral vectors are used. Retroviruses are a class of integrative viruses which replicate using a virus-encoded reverse transcriptase, to replicate the viral RNA genome into double stranded DNA which is integrated into chromosomal DNA of the infected cells (e.g., target cells). Such vectors include those derived from murine leukemia viruses, especially Moloney (Gilboa, et al., 1988, Adv. Exp. Med. Biol. 241: 29) or Friend's FB29 strains (WO 95/01447). Generally, a retroviral vector is deleted of all or part of the viral genes gag, pol and env and retains 5′ and 3′ LTRs and an encapsidation sequence. These elements may be modified to increase expression level or stability of the retroviral vector. Such modifications include the replacement of the retroviral encapsidation sequence by one of a retrotransposon such as VL30 (see, e.g., U.S. Pat. No. 5,747,323). Preferably, the improved LAMP Construct is inserted downstream of the encapsidation sequence, preferably in opposite direction relative to the retroviral genome. Cell specific targeting may be achieved by the conjugation of antibodies or antibody fragments to the retroviral envelope protein as is known in the art.

[0196] Retroviral particles are prepared in the presence of a helper virus or in an appropriate complementation (packaging) cell line which contains integrated into its genome the retroviral genes for which the retroviral vector is defective (e.g. gag/pol and env). Such cell lines are described in the prior art (Miller and Rosman, 1989, BioTechniques 7: 980; Danos and Mulligan, 1988, Proc. Natl. Acad. Sci. USA 85: 6460; Markowitz, et al., 1988, Virol. 167: 400). The product of the env gene is responsible for the binding of the viral particle to the viral receptors present on the surface of the target cell and, therefore determines the host range of the retroviral particle. in the context of the invention, it is advantageous to use a packaging cell line, such as the PA317 cells (ATCC CRL 9078) or 293E16 (WO97/35996) containing an amphotropic envelope protein, to allow infection of human and other species' target cells. The retroviral particles are preferably recovered from the culture supernatant and may optionally be further purified according to standard techniques (e.g. chromatography, ultracentrifugation).

[0197] Other suitable viruses include poxviruses. The genome of several members of poxyiridae has been mapped and sequenced. A poxyiral vector may be obtained from any member of the poxyiridae, in particular canarypox, fowlpox and vaccinia virus. Suitable vaccinia viruses include, but are not limited to, the Copenhagen strain (Goebel, et al., 1990, Virol. 179: 247-266; Johnson, et al., 1993, Virol. 196: 381-401), the Wyeth strain and the modified Ankara (MVA) strain (Antoine, et al., 1998, Virol. 244: 365-396). The general conditions for constructing a vaccinia virus vector are known in the art (see, e.g., EP 83 286 and EP 206 920; Mayr et al., 1975, Infection 3: 6-14; Sutter and Moss, 1992, Proc. Natl. Acad. Sci. USA 89: 10847-10851). Preferably, the polynucleotide of interest is inserted within a non-essential locus such as the noncoding intergenic regions or any gene for which inactivation or deletion does not significantly impair viral growth and replication.

[0198] Poxyiral particles are prepared as described in the art (Piccini, et al., 1987, Methods of Enzymology 153: 545-563; U.S. Pat. Nos. 4,769,330; 4,772,848; 4,603,112; 5,100,587 and 5,179,993). Generally, a donor plasmid is constructed, amplified by growth in E. coli and isolated by conventional procedures. Then, it is introduced into a suitable cell culture (e.g. chicken embryo fibroblasts) together with a poxvirus genome, to produce, by homologous recombination, poxyiral particles. These can be recovered from the culture supernatant or from the cultured cells after a lysis step (e.g., chemical lysis, freezing/thawing, osmotic shock, sonication and the like). Consecutive rounds of plaque purification can be used to remove contaminating wild type virus. Viral particles can then be purified using the techniques known in the art (e.g., chromatographic methods or ultracentrifugation on cesium chloride or sucrose gradients).

[0199] The use of vaccinia as a live virus vaccine in the global campaign to eradicate smallpox made vaccinia an obvious choice for development as a live recombinant vaccine vector. Live recombinant vaccinia viruses expressing close to 100 different foreign proteins have been reported, and a number of these are effective experimental vaccines (reviewed by Moss and Flexner, 1987). Vaccinia is particularly versatile as an expression vector because of its large genomic size, capability of accepting at least 25,000 base pairs of foreign DNA, and its ability to infect most eukaryotic cell types, including insect cells (ibid.). Unlike other DNA viruses, poxviruses replicate exclusively in the cytoplasm of infected cells, reducing the possibility of genetic exchange of recombinant viral DNA with the host chromosome. Recombinant vaccinia vectors have been shown to properly process and express proteins from a variety of sources including man, other mammals, parasites, RNA and DNA viruses, bacteria and bacteriophage.

[0200] The expression of DNA encoding a foreign protein is controlled by host virus regulatory elements, including upstream promoter sequences and, where necessary, RNA processing signals. Insertion of foreign DNA into nonessential regions of the vaccinia virus genome has been carried out by homologous recombination (Panicali, et al., Proc. Nat'l. Acad. Sci, USA, 79: 4927, 1982; Mackett, et al., Proc. Nat'l. Acad. Sci. USA, 79: 7415, 1982).

[0201] Expression of cancer antigens by the improved LAMP Construct may occur because of transcriptional regulatory elements at or near the site of insertion or by more precise genetic engineering. Plasmid vectors that greatly facilitate insertion and expression of foreign genes have been constructed (Mackett, et al., J. Virol, 49: 857, 1982). These vectors contain an expression site, composed of a vaccinia transcriptional promoter and one or more unique restriction endonuclease sites for insertion of the foreign coding sequence flanked by DNA from a nonessential region of the vaccinia genome. The choice of promoter determines both the time (e.g., early or late) and level of expression, whereas the flanking DNA sequence determines the site of homologous recombination.

[0202] Only about one in a thousand virus particles produced by this procedure is a recombinant. Although recombinant virus plaques can be identified by DNA hybridization, efficient selection procedures have been developed. By using segments of nonessential vaccinia virus thymidine kinase (TK) gene as flanking sequences, the foreign gene recombines into the TK locus and by insertion inactivates the TK gene. Selection of TK virus is achieved by carrying out the virus plaque assay in TK cells in the presents of 5-bromodeoxyuridine. Phosphorylation of the nucleoside analogue and consequent lethal incorporation into viral DNA occurs only in cells infected with TK+ parental virus. Depending on the efficiency of the transfection and recombination, up to 80 of the plaques are desired recombinants, and the rest are spontaneous TK mutants.

[0203] Plasmid vectors that contain the E. coli beta-galactosidase gene, as well as an expression site for a second gene, permit an alternative method of distinguishing recombinant from parental virus (Chakrabarti, et al., Mol. Cell. Biol., 5: 3403, 1985). Plaques formed by such recombinants can be positively identified by the blue color that forms upon addition of an appropriate indicator. By combining both TK selection and beta-galactosidase expression, recombinant virus is readily and quickly isolated. The recombinants are then amplified by propagation in suitable cell lines and expression of the inserted gene is checked by appropriate enzymological, immunological or physical procedures.

[0204] An upper limit to the amount of genetic information that can be added to the vaccinia virus genome is not yet known. However, the addition of nearly 25,000 base pairs of foreign DNA had no apparent deleterious effect on virus yield (Smith, et al., Gene, 25:21, 1983). Were it necessary, large segments of the vaccinia virus genome could be deleted to provide additional capacity (Moss, et al., J. Virol. 40: 387, 1981).

[0205] Viral capsid molecules may include targeting moieties to facilitate targeting and/or entry into cells. Suitable targeting molecules, include, but are not limited to: chemical conjugates, lipids, glycolipids, hormones, sugars, polymers (e.g. PEG, polylysine, PEI and the like), peptides, polypeptides (see, e.g., WO 94/40958), vitamins, antigens, lectins, antibodies and fragments thereof. Preferably, such targeting molecules recognize and bind to cell-specific markers, tissue-specific markers, cellular receptors, viral antigens, antigenic epitopes or tumor-associated markers.

[0206] Compositions comprising an improved LAMP Construct based on viral particles may be formulated in the form of doses of between 10 and 10¹⁴ i.u. (infectious units), and preferably, between 10 and 10¹¹ i.u. The titer may be determined by conventional techniques. The doses of LAMP Constructs are preferably comprised between 0.01 and 10 mg/kg, more especially between 0.1 and 2 mg/kg.

### Self-Replicating RNA

[0207] Self-replicating RNA virus vectors can also be constructed using the improved LAMP Constructs as described herein. For example, alphaviruses, flavivuses, measle virus and rhabdoviruses can be used to generate self-replicating RNA virus vaccines. Preferred strains of self-replicating RNA viruses include, but are not limited to rabies virus (RABV), vesicular stomatisitis virus (VSV), West Nile virus, Kunjin virus, Semliki Forest virus (SFV), Sindbis virus (SIN) and/or Venezuelan equine encephalitis virus (VEE).

[0208] Self-replicating RNA viruses express the native antigen upon delivery into tissue, thus mimicking live attenuated vaccines without having the risk of reversion to pathogenicity. They also stimulate the innate immune system, thus potentiating responses. See, e.g., Ljungberg, K. “Self-replicating alphavirus RNA vaccines,” Expert Rev Vaccines (2):177-94 (2015); Lundstrom, K., “Oncolytic Alphaviruses in Cancer Immunotherapy”, Vaccines 5:9 (2017); Lundstrom, K. “Replicon RNA Viral Vectors as Vaccines,” Vaccines 4:39 (2016) (hereby incorporated by reference in their entirety). Use of self-replicating vaccines comprising the improved LAMP Constructs described herein can also be used in prime-boost protocols.

[0209] Moreover, self-replicating RNA viruses can also be encapsulated by liposomes, as described herein, to improve delivery and targeting Immunization with self-replicating RNA viruses comprising the improved LAMP Constructs described herein may provide higher transient expression levels of antigens resulting in generation of neutralizing antibody responses and protection against lethal challenges under safe conditions.

### Cell-Based Delivery Vehicles

[0210] The improved LAMP Constructs according to the invention can be delivered to target cells by means of other cells (“delivery cells”) which comprise the constructs. Methods for introducing constructs into cells are known in the art and include microinjection of DNA into the nucleus of a cell (Capechi, et al., 1980, Cell 22: 479-488); transfection with CaPO₄ (Chen and Okayama, 1987, Mol. Cell Biol. 7: 2745 2752), electroporation (Chu, et al., 1987, Nucleic Acid Res. 15: 1311-1326); lipofection/liposome fusion (Feigner, et al., 1987, Proc. Natl. Acad. Sci. USA 84: 7413-7417) and particle bombardment (Yang, et al., 1990, Proc. Natl. Acad. Sci. USA 87: 9568-9572). Suitable cells include autologous and non-autologous cells, and may include xenogenic cells. Delivery cells may be induced to deliver their contents to the target cells by inducing their death (e.g., by providing inducible suicide genes to these cells).

### Accessory Molecules

[0211] The compositions comprising the improved LAMP Constructs according to the invention may comprise one or more accessory molecules for facilitating the introduction of an improved LAMP Construct into a cell and/or for enhancing a particular therapeutic effect and/or enhancing antibody production.

[0212] In addition, the composition comprising the improved LAMP Construct according to the present invention may include one or more stabilizing substance(s), such as lipids, nuclease inhibitors, hydrogels, hyaluronidase (WO 98/53853), collagenase, polymers, chelating agents (EP 890362), in order to inhibit degradation within the animal/human body and/or improve transfection/infection of the vector into a target cell. Such substances may be used alone or in combination (e.g., cationic and neutral lipids).

[0213] It has also been shown that adenovirus proteins are capable of destabilizing endosomes and enhancing the uptake of DNA into cells. The mixture of adenoviruses to solutions containing a lipid-complexed DNA vector or the binding of DNA to polylysine covalently attached to adenoviruses using protein cross-linking agents may substantially improve the uptake and expression of an improved LAMP Construct (see, e.g., Curiel, et al., 1992, Am. I. Respir. Cell. Mol. Biol. 6: 247-252).

### Host Cells

[0214] Improved LAMP Constructs according to the invention can be expressed in a variety of host cells, including, but not limited to: prokaryotic cells (e.g., E. coli, Staphylococcus sp., Bacillus sp.); yeast cells (e.g., Saccharomyces sp.); insect cells; nematode cells; plant cells; amphibian cells (e.g., Xenopus); avian cells; and mammalian cells (e.g., human cells, mouse cells, mammalian cell lines, primary cultured mammalian cells, such as from dissected tissues).

[0215] The molecules can be expressed in host cells isolated from an organism, host cells which are part of an organism, or host cells which are introduced into an organism. In one aspect, improved LAMP Constructs are expressed in host cells in vitro, e.g., in culture. In another aspect, improved LAMP Constructs are expressed in a transgenic organism (e.g., a transgenic mouse, rat, rabbit, pig, primate, etc.) that comprises somatic and/or germline cells comprising nucleic acids encoding the improved LAMP Constructs. Methods for constructing transgenic animals are well known in the art and are routine.

[0216] Improved LAMP Constructs also can be introduced into cells in vitro, and the cells (e.g., such as stem cells, hematopoietic cells, lymphocytes, and the like) can be introduced into the host organism. The cells may be heterologous or autologous with respect to the host organism. For example, cells can be obtained from the host organism, improved LAMP Constructs introduced into the cells in vitro, and then reintroduced into the host organism.

### Antigen Presenting Cells

[0217] In a preferred aspect of the invention, an improved LAMP Construct as described herein is introduced into a natural or engineered antigen presenting cell.

[0218] The term “antigen presenting cell” (APC) as used herein intends any cell which presents on its surface an antigen in association with a major histocompatibility complex molecule, preferably a class II molecule, or portion thereof. Examples of suitable APCs are discussed in detail below and include, but are not limited to, whole cells such as macrophages, dendritic cells, B cells, hybrid APCs, and foster antigen presenting cells. Methods of making hybrid APCs are described and known in the art.

[0219] Dendritic cells (DCs) are potent antigen-presenting cells. It has been shown that DCs provide all the signals required for T cell activation and proliferation. These signals can be categorized into two types. The first type, which gives specificity to the immune response, is mediated through interaction between the T-cell receptor/CD3 (“TCR/CD3”) complex and an antigenic peptide presented by a major histocompatibility complex (“MHC” defined above) class I or II protein on the surface of APCs. This interaction is necessary, but not sufficient, for T cell activation to occur. In fact, without the second type of signals, the first type of signals can result in T cell anergy. The second type of signals, called co-stimulatory signals, is neither antigen-specific nor MHC-restricted, and can lead to a full proliferation response of T cells and induction of T cell effector functions in the presence of the first type of signals.

[0220] Several molecules have been shown to enhance co-stimulatory activity. These include, but are not limited to, heat stable antigen (HSA), chondroitin sulfate-modified MHC invariant chain (Ii-CS), intracellular adhesion molecule I (ICAM-1), and B7 co-stimulatory molecule on the surface of APCs and its counter-receptor CD28 or CTLA-4 on T cells.

[0221] Other important co-stimulatory molecules are CD40, CD54, CD80, CD86. As used herein, the term “co-stimulatory molecule” encompasses any single molecule or combination of molecules which, when acting together with a peptide/MHC complex bound by a TCR on the surface of a T cell, provides a co-stimulatory effect which achieves activation of the T cell that binds the peptide. The term thus encompasses B7, or other co-stimulatory molecule(s) on an APC, fragments thereof (alone, complexed with another molecule(s), or as part of a fusion protein) which, together with peptide/MHC complex, binds to a cognate ligand and result in activation of the T cell when the TCR on the surface of the T cell specifically binds the peptide. Co-stimulatory molecules are commercially available from a variety of sources, including, for example, Beckman Coulter.

[0222] In one aspect of the invention, the method described in Romani et al., J. Immunol. Methods 196: 135-151, 1996, and Bender et al, J. Immunol. Methods 196: 121-135, 1996, are used to generate both immature and mature dendritic cells from the peripheral blood mononuclear cells (PBMCs) of a mammal, such as a murine, simian or human Briefly, isolated PBMCs are pre-treated to deplete T- and B-cells by means of an immunomagnetic technique. Lymphocyte-depleted PBMC are then cultured for in RPMI medium 9 e.g., about 7 days), supplemented with human plasma (preferably autologous plasma) and GM-CSF/IL-4, to generate dendritic cells. Dendritic cells are nonadherent when compared to their monocyte progenitors. Thus, on approximately day 7, non-adherent cells are harvested for further processing.

[0223] The dendritic cells derived from PBMC in the presence of GM-CSF and IL-4 are immature, in that they can lost the nonadherence property and revert back to macrophage cell fate if the cytokine stimuli are removed from the culture. The dendritic cells in an immature state are very effective in processing native protein antigens for the MHC class II restricted pathway (Romani, et al., J. Exp. Med. 169:1169, 1989). Further maturation of cultured dendritic cells is accomplished by culturing for 3 days in a macrophage-conditioned medium (CM), which contains the necessary maturation factors. Mature dendritic cells are less able to capture new proteins for presentation but are much better at stimulating resting T cells (both CD4 and CD8) to grow and differentiate.

[0224] Mature dendritic cells can be identified by their change in morphology, such as the formation of more motile cytoplasmic processes; by their nonadherence; by the presence of at least one of the following markers: CD83, CD68, HLA-DR or CD86; or by the loss of Fc receptors such as CD 115 (reviewed in Steinman, Annu. Rev. Immunol. 9: 271, 1991). Mature dendritic cells can be collected and analyzed using typical cytofluorography and cell sorting techniques and devices, such as FACScan and FACStar. Primary antibodies used for flow cytometry are those specific to cell surface antigens of mature dendritic cells and are commercially available. Secondary antibodies can be biotinylated Igs followed by FITC- or PE-conjugated streptavidin.

[0225] Alternatively, others have reported that a method for upregulating (activating) dendritic cells and converting monocytes to an activated dendritic cell phenotype. This method involves the addition of calcium ionophore to the culture media convert monocytes into activated dendritic cells. Adding the calcium 21 ionophore A23187, for example, at the beginning of a 24-48 hour culture period resulted in uniform activation and dendritic cell phenotypic conversion of the pooled “monocyte plus DC” fractions: characteristically, the activated population becomes uniformly CD 14 (Leu M3) negative, and upregulates HLA-DR, HLA-DQ, ICAM-1,137.1, and 137.2. Furthermore, this activated bulk population functions as well on a small numbers basis as a further purified. Specific combination(s) of cytokines have been used successfully to amplify (or partially substitute) for the activation/conversion achieved with calcium ionophore: these cytokines include but are not limited to G-CSF, GM-CSF, IL-2, and IL-4. Each cytokine when given alone is inadequate for optimal upregulation.

[0226] The second approach for isolating APCs is to collect the relatively large numbers of precommitted APCs already circulating in the blood. Previous techniques for isolating committed APCs from human peripheral blood have involved combinations of physical procedures such as metrizamide gradients and adherence/nonadherence steps (Freudenthal et al. PNAS 87: 7698-7702, 1990); Percoll gradient separations (Mehta-Damani, et al., J. Immunol. 153: 996-1003, 1994); and fluorescence activated cell sorting techniques (Thomas et al., J. Immunol. 151: 6840-52, 1993).

[0227] There are many other methods routine in the art for isolating professional antigen presenting cells (or their precursors) and that such methods and others which may be developed are not limiting and are encompassed within the scope of the invention.

[0228] In one embodiment, the APCs and therefore the cells presenting one or more antigens are autologous. In another embodiment, the APCs presenting the antigen are allogeneic, i.e., derived from a different subject.

[0229] As discussed herein, improved LAMP Constructs can be introduced into APCs using the methods described above or others known in the art, including, but not limited to, transfection, electroporation, fusion, microinjection, viral-based delivery, or cell based delivery. Arthur et al., Cancer Gene Therapy 4(1): 17-25, 1997, reports a comparison of gene transfer methods in human dendritic cells.

[0230] Known, partial and putative human leukocyte antigen (HLA), the genetic designation for the human MHC, amino acid and nucleotide sequences, including the consensus sequence, are published (see, e.g., Zemmour and Parham, Immunogenetics 33: 310-320, 1991), and cell lines expressing HLA variants are known and generally available as well, many from the American Type Culture Collection (“ATCC”). Therefore, using PCR, MHC class II-encoding nucleotide sequences are readily operatively linked to an expression vector of this invention that is then used to transform an appropriate cell for expression therein.

[0231] Professional APCs can be used, such as macrophages, B cells, monocytes, dendritic cells, and Langerhans cells. These are collected from the blood or tissue of 1) an autologous donor; 2) a heterologous donor having a different HLA specificity then the host to be treated; or 3) from a xenogeneic donor of a different species using standard procedures (Coligan, et. al., Current Protocols in Immunology, sections 3 and 14, 1994). The cells may be isolated from a normal host or a patient having an infectious disease, cancer, autoimmune disease, or allergy.

[0232] Professional APCs may be obtained from the peripheral blood using leukopheresis and “FICOLL/HYPAQUE” density gradient centrifugation (stepwise centrifugation through Ficoll and discontinuous Percoll density gradients). Procedures are utilized which avoid the exposure of the APCs to antigens which could be internalized by the APCs, leading to activation of T cells not specific for the antigens of interest.

[0233] Cells which are not naturally antigen presenting can be engineered to be antigen presenting by introducing sequences encoding appropriate molecules. For example, nucleic acid sequences encoding MHC class II molecules, accessory molecules, co-stimulatory molecules and antigen processing assisting molecules can be introduced after direct synthesis, cloning, purification of DNA from cells containing such genes, and the like. One expedient means to obtain genes for encoding the molecules used in the improved LAMP Constructs and methods described herein is by polymerase chain reaction (PCR) amplification on selected nucleic acid templates with selected oligonucleotide primer pairs. For example, epithelial cells, endothelial cells, tumor cells, fibroblasts, activated T cells, eosinophils, keratinocytes, astrocytes, microglial cells, thymic cortical epithelial cells, Schwann cells, retinal pigment epithelial cells, myoblasts, vascular smooth muscle cells, chondrocytes, enterocytes, thyrocytes and kidney tubule cells can be used. These may be primary cells recently explanted from a host and not extensively passaged in cell culture to form an established cell line, or established cell lines that are relatively homogeneous and capable of proliferating for many generations or indefinitely.

[0234] Cells that are not professional APCs are isolated from any tissue of an autologous donor; a heterologous donor or a xenogeneic donor, where they reside using a variety of known separation methods (Darling, Animal Cells: Culture and Media. J. Wiley, New York, 1994; Freshney, Culture of Animal Cells. Alan R. Liss, Inc., New York, 1987). Non-autologous cells, e.g., heterologous or xenogeneic cells, can be engineered ex vivo to express HLA class I and class II molecules that match known human HLA specificities. These cells can then be introduced into a human subject matching the HLA specificity of the engineered cells. The cells are further engineered ex vivo to express one or more LAMP Constructs according to the invention.

[0235] The engineered cells are maintained in cell culture by standard cell culture methods (Darling, Animal Cells: Culture and Media”. J. Wiley, New York, 1994; Freshney, Culture of Animal Cells”. Alan R. Liss, Inc., New York, 1987). Cell lines for use in the present invention are obtained from a variety of sources (e.g., ATCC Catalogue of Cell Lines & Hybidomas, American Type Culture Collection, 8th edition, 1995), or are produced using standard methods (Freshney, Culture of Immortalized Cells, Wiley-Liss, New York, 1996). Non-transformed cell lines are preferred for use in human subjects.

[0236] In one aspect, CD34+ precursors that are differentiating under the influence of GM-CSF into dendritic cells are obtained from the body of a subject and nucleic acids encoding LAMP Constructs according to the invention are introduced into the cells, which are then injected into the subject. Utilizing the improved LAMP Constructs as described herein will enhance the association of peptides derived from a particular antigen with MHC class II molecules on the transduced antigen presenting cells, resulting in significantly more potent systemic T cell dependent immune responses and/or antibody production. While the antigen presenting cells transfected in this strategy are preferably autologous cells, any MHC class II cells that effectively present antigen in the host may be used as described above.

### Peptide Vaccines

[0237] Also within the scope of this invention are peptide vaccines encoded by the improved LAMP Construct Preferably, the antigen is processed within the compartment/organelle (or subsequent compartment/organelle to which it is delivered) to generate an epitope bound to an MHC class II molecule capable of modulating an immune response.

[0238] The peptide vaccines encoded by the improved LAMP Constructs may also may be bound in a membranous structure to facilitate its administration to the body of an organism. For example, the peptide vaccine encoded by the improved LAMP Construct may be incorporated into liposomes, as described in U.S. Pat. No. 4,448,765.

[0239] When a protein or polypeptide is to be used as an immunogen, it may be produced by expression of any one or more of the improved LAMP Constructs described herein in a recombinant cell or it may be prepared by chemical synthesis. For example, the Merrifield technique (Journal of American Chemical Society, vol. 85, pp. 2149-2154, 1968), can be used.

### Methods of Producing Antibodies Using LAMP Constructs

[0240] The improved LAMP Constructs as polynucleotides, the encoded proteins of the improved LAMP Constructs, and/or cells (such as antigen presenting cells which express the improved LAMP Constructs described herein) can be used to generate antibodies by methods well known by the skilled artisan, such as, for example, methods described in the art. See, for instance, Sutcliffe et al., supra; Wilson et al., supra; Chow et al., Proc. Natl. Acad. Sci. USA 82:910-914 (1985); and Bittle et al., J. Gen. Virol. 66:2347-2354 (1985). If in vivo immunization is used, animals may be immunized with a protein encoded by the improved LAMP Construct and/or a polynucleotide comprising the improved LAMP Construct comprising an antigen as described herein. Priming with improved LAMP Constructs as polynucleotides, the encoded proteins of the improved LAMP Constructs, and/or cells (such as antigen presenting cells which express the improved LAMP Constructs described herein) followed by boosting with an antigen is a preferred embodiment of the invention. In further preferred embodiments, priming with an improved LAMP Construct as described herein followed by boosting with an antigen is specifically contemplated and can be used to generate an even more robust immune response, especially in view of antibody repertoire diversity and titer.

[0241] The improved LAMP Construct comprising the antigen may be injected into the non-human vertebrate to raise antibodies. Preparation and injection of LAMP Constructs into non-human vertebrates can be accomplished according to principles of immunization of animals that are well known to those skilled in the art.

[0242] The use of an improved LAMP Construct to effectively present the antigen involves, in one aspect, the antigen being processed by LAMP in Antigen Presenting Cells after endocytosis and fusion of the endosome with a lysosome. The endosome then merges with an exocytic vesicle from the Golgi apparatus containing class II MHC molecules, to which the resultant peptides bind. The MHC-peptide complex then trafficks to the plasma membrane where the antigen is available for display to CD4⁺ T cells.

[0243] Animals such as rabbits, rats, mice, llamas, camels, and/or cows can be immunized with the improved LAMP Construct comprising an antigen and/or a polynucleotide encoding the improved LAMP Construct comprising an antigen. Additional animals suitable for immunization include, non-human mammals, such as a rodent (e.g. a guinea pig, a hamster, a rat, a mouse), murine (e.g. a mouse), canine (e.g. a dog), feline (e.g. a cat), equine (e.g. a horse), a primate, simian (e.g. a monkey or ape), a monkey (e.g. marmoset, baboon, rhesus macaque), an ape (e.g. gorilla, chimpanzee, orangutan, gibbon).

[0244] For instance, intraperitoneal and/or intradermal injection of emulsions containing about 100 micrograms of an improved LAMP Construct comprising an antigen or carrier protein and Freund's adjuvant or any other adjuvant known for stimulating an immune response may be used. Several booster injections (such as with the recombinant antigen protein) may be needed, for instance, at intervals of about two weeks, to provide a useful titer of an anti-antigen antibody which can be detected, for example, by ELISA assay using free antigen adsorbed, directly or indirectly (e.g., via a biotinylated AviTag), to a solid surface. The titer of anti-antigen antibodies in serum from an immunized animal may be increased by selection of anti-antibodies, for instance, by adsorption to the antigen on a solid support and elution of the selected antibodies according to methods well known in the art.

[0245] Alternatively, a polynucleotide encoding the improved LAMP Construct comprising an antigen can also be directly introduced into animals See, for example, U.S. Pat. Nos. 5,676,954; 6,875,748; 5,661,133; Sahin et al., Nat Rev Drug Discov, 2014 October; 13(10):759-80; Kariko et al., Mol Ther, 2008 November; 16(11):1833-40; Kariko et al., Nucleic Acid Res, 2011, November; 39(21):e142; U.S. Pat. No. 6,511,832. In one example, an improved LAMP Construct comprising an antigen is directly injected into a non-human vertebrate. Injection into the animals can occur via intramuscular, intradermal, intranasal, subcutaneous, intravenous, intratracheal, and intrathecal deliveries. Follow-on boosting with a recombinant antigen can also be include in generating the antibodies.

[0246] Additionally, antibodies generated by the disclosed methods can be affinity matured using display technology, such as for example, phage display, yeast display or ribosome display. In one example, single chain antibody molecules (“scFvs”) displayed on the surface of phage particles are screened to identify those scFvs that immunospecifically bind to the antigen and/or the starting protein. The present invention encompasses both scFvs and portions thereof that are identified to immunospecifically bind to the antigen and/or the starting protein. Such scFvs can routinely be “converted” to immunoglobulin molecules by inserting, for example, the nucleotide sequences encoding the VH and/or VL domains of the scFv into an expression vector containing the constant domain sequences and engineered to direct the expression of the immunoglobulin molecule.

[0247] Recombinant expression of the raised antibodies (including scFvs and other molecules comprising, or alternatively consisting of, antibody fragments or variants thereof (e.g., a heavy or light chain of an antibody of the invention or a portion thereof or a single chain antibody of the invention)) using the improved LAMP Construct comprising an antigen and/or a polynucleotide encoding the improved LAMP Construct comprising an antigen of the invention, requires construction of an expression vector(s) containing a polynucleotide that encodes the antibody or fragment or variant thereof. Once a polynucleotide encoding an antibody molecule (e.g., a whole antibody, a heavy or light chain of an antibody, or variant or portion thereof (preferably, but not necessarily, containing the heavy or light chain variable domain)), of the invention has been obtained, the vector(s) for the production of the antibody molecule may be produced by recombinant DNA technology using techniques well known in the art. Thus, methods for preparing an antibody by expressing a polynucleotide containing an antibody encoding nucleotide sequence are described herein. Methods which are well known to those skilled in the art can be used to construct expression vectors containing the antibody coding sequences and appropriate transcriptional and translational control signals. These methods include, for example, in vitro recombinant DNA techniques, synthetic techniques, and in vivo genetic recombination and are described herein. The invention, thus, provides replicable vectors comprising a nucleotide sequence encoding the anti-antigen antibody obtained and isolated as described herein (e.g., a whole antibody, a heavy or light chain of an antibody, a heavy or light chain variable domain of an antibody, or a portion thereof, or a heavy or light chain CDR, a single chain Fv, or fragments or variants thereof), operably linked to a promoter. Such vectors may include the nucleotide sequence encoding the constant region of the antibody molecule (see, e.g., PCT Publication WO 86/05807; PCT Publication WO 89/01036; and U.S. Pat. No. 5,122,464) and the variable domain of the antibody may be cloned into such a vector for expression of the entire heavy chain, the entire light chain, or both the entire heavy and light chains.

[0248] The expression vector(s) can be transferred to a host cell by conventional techniques and the transfected cells are then cultured by conventional techniques to produce either the anti-antigen antibody. Thus, the invention includes host cells containing polynucleotide(s) encoding the anti-antigen antibody (e.g., whole antibody, a heavy or light chain thereof, or portion thereof, or a single chain antibody of the invention, or a fragment or variant thereof), operably linked to a heterologous promoter. In preferred embodiments, for the expression of entire antibody molecules, vectors encoding both the heavy and light chains may be co-expressed in the host cell for expression of the entire immunoglobulin molecule, as detailed below.

[0249] A variety of host-expression vector systems may be utilized to express anti-antigen antibody. Such host-expression systems represent vehicles by which the coding sequences of interest may be produced and subsequently purified, but also represent cells which may, when transformed or transfected, with the appropriate nucleotide coding sequences, express the anti-antigen antibody. These include, but are not limited to, microorganisms such as bacteria (e.g., E. coli, B. subtilis) transformed with recombinant bacteriophage DNA, plasmid DNA or cosmid DNA expression vectors containing sequences; yeast (e.g., Saccharomyces, Pichia) transformed with recombinant yeast expression vectors containing coding sequences; insect cell systems infected with recombinant virus expression vectors (e.g., baculovirus) containing coding sequences; plant cell systems infected with recombinant virus expression vectors (e.g., cauliflower mosaic virus, CaMV; tobacco mosaic virus, TMV) or transformed with recombinant plasmid expression vectors (e.g., Ti plasmid) containing coding sequences; or mammalian cell systems (e.g., COS, CHO, BHK, 293, 3T3 cells) harboring recombinant expression constructs containing promoters derived from the genome of mammalian cells (e.g., metallothionein promoter) or from mammalian viruses (e.g., the adenovirus late promoter; the vaccinia virus 7.5K promoter). Preferably, bacterial cells such as Escherichia coli, and more preferably, eukaryotic cells, are used for the expression of the anti-antigen antibody. For example, mammalian cells such as Chinese hamster ovary cells (CHO), in conjunction with a vector such as the major intermediate early gene promoter element from human cytomegalovirus is an effective expression system (Foecking et al., Gene 45:101 (1986); Cockett et al., Bio/Technology 8:2 (1990)).

[0250] In bacterial systems, a number of expression vectors may be advantageously selected depending upon the intended use. For example, when a large quantity of a protein is to be produced (for either antibody production or encoded polypeptides of the improved LAMP Construct), vectors which direct the expression of high levels of fusion protein products that are readily purified may be desirable. Such vectors include, but are not limited to, the E. coli expression vector pUR278 (Ruther et al., EMBO 1. 2:1791 (1983)), in which the coding sequence may be ligated individually into the vector in frame with the lac Z coding region so that a fusion protein is produced; pIN vectors (Inouye & Inouye, Nucleic Acids Res. 13:3101-3109 (1985); Van Heeke & Schuster, J. Biol. Chem. 24:5503-5509 (1989)); and the like. pGEX vectors may also be used to express foreign polypeptides as fusion proteins with glutathione 5-transferase (GST). In general, such fusion proteins are soluble and can easily be purified from lysed cells by adsorption and binding to matrix glutathione agarose beads followed by elution in the presence of free glutathione. The pGEX vectors are designed to include thrombin or Factor Xa protease cleavage sites so that the cloned target gene product can be released from the GST moiety.

[0251] In an insect system, Autographa californica nuclear polyhedrosis virus (AcNPV) may be used as a vector to express an anti-antigen antibody or the encoded polypeptides of the improved LAMP Construct. The virus grows in Spodoptera frugiperda cells. Coding sequences may be cloned individually into non-essential regions (for example, the polyhedrin gene) of the virus and placed under control of an AcNPV promoter (for example, the polyhedrin promoter).

[0252] In mammalian host cells, a number of viral-based expression systems may be utilized express an anti-antigen antibody or the encoded polypeptides of the improved LAMP Construct. In cases where an adenovirus is used as an expression vector, the coding sequence of interest may be ligated to an adenovirus transcription/translation control complex, e.g., the late promoter and tripartite leader sequence. This chimeric gene may then be inserted in the adenovirus genome by in vitro or in vivo recombination.

[0253] Insertion in a non-essential region of the viral genome (e.g., region E1 or E3) will result in a recombinant virus that is viable and capable of expressing the anti-antigen antibody or the encoded polypeptides of the improved LAMP Construct in infected hosts (e.g., see Logan & Shenk, Proc. Natl. Acad. Sci. USA 8 1:355-359 (1984)).

[0254] Specific initiation signals may also be required for efficient translation of inserted coding sequences. These signals include the ATG initiation codon and adjacent sequences. Furthermore, the initiation codon must be in phase with the reading frame of the desired coding sequence to ensure translation of the entire insert. These exogenous translational control signals and initiation codons can be of a variety of origins, both natural and synthetic. The efficiency of expression may be enhanced by the inclusion of appropriate transcription enhancer elements, transcription terminators, etc. (see, e.g., Bittner et al., Methods in Enzymol. 153:51-544 (1987)).

[0255] In addition, a host cell strain may be chosen which modulates the expression of the inserted sequences, or modifies and processes the gene product in the specific fashion desired. Such modifications (e.g., glycosylation) and processing (e.g., cleavage) of protein products may be important for the function of the protein. Different host cells have characteristic and specific mechanisms for the post-translational processing and modification of proteins and gene products. Appropriate cell lines or host systems can be chosen to ensure the correct modification and processing of the foreign protein expressed, to this end, eukaryotic host cells which possess the cellular machinery for proper processing of the primary transcript, glycosylation, and phosphorylation of the gene product may be used. Such mammalian host cells include, but are not limited to, CHO, VERY, BHK, Hela, COS, NSO, MDCK, 293, 3T3, W138, and in particular, breast cancer cell lines such as, for example, BT483, Hs578T, HTB2, BT2O and T47D, and normal mammary gland cell line such as, for example, CRL7O3O and HsS78Bst.

[0256] For long-term, high-yield production of recombinant proteins, stable expression is preferred. For example, cell lines which stably express the express an anti-antigen antibody or the encoded polypeptides of the improved LAMP Construct may be engineered. Rather than using expression vectors which contain viral origins of replication, host cells can be transformed with a polynucleotide controlled by appropriate expression control elements (e.g., promoter, enhancer, sequences, transcription terminators, polyadenylation sites, etc.), and a selectable marker. Following the introduction of the foreign polynucleotide, engineered cells may be allowed to grow for 1-2 days in an enriched media, and then are switched to a selective media. The selectable marker in the recombinant plasmid confers resistance to the selection and allows cells to stably integrate the plasmid into their chromosomes and grow to form foci which in turn can be cloned and expanded into cell lines. This method may advantageously be used to engineer cell lines which express the anti-antigen antibody or the encoded polypeptides of the improved LAMP Construct.

[0257] A number of selection systems may be used, including but not limited to, the herpes simplex virus thymidine kinase (Wigler et al., Cell 11:223 (1977)), hypoxanthineguanine phosphoribosyltransferase (Szybalska & Szybalski, Proc. Natl. Acad. Sci. USA 48:202 (1992)), and adenine phosphoribosyltransferase (Lowy et al., Cell 22:8 17 (1980)) genes can be employed in tk-, hgprt- or aprt- cells, respectively. Also, antimetabolite resistance can be used as the basis of selection for the following genes: dhfr, which confers resistance to methotrexate (Wigler et al., Natl. Acad. Sci. USA 77:357 (1980); O'Hare et al., Proc. Natl. Acad. Sci. USA 78:1527 (1981)); gpt, which confers resistance to mycophenolic acid (Mulligan & Berg, Proc. Natl. Acad. Sci. USA 78:2072 (1981)); neo, which confers resistance to the aminoglycoside G-418 (Goldspiel et al., Clinical Pharmacy, 12: 488-505 (1993); Wu and Wu, Biotherapy 3:87-95 (1991); Tolstoshev, Ann. Rev. Pharmacol. Toxicol. 32:573-596 (1993); Mulligan, Science 260:926-932 (1993); and Morgan and Anderson, Ann. Rev. Biochem. 62: 191-217 (1993); TIB TECH 11(5):155-215 (May; 1993)); and hygro, which confers resistance to hygromycin (Santerre et al., Gene 30:147 (1984)). Methods commonly known in the art of recombinant DNA technology may be routinely applied to select the desired recombinant clone, and such methods are described, for example; in Ausubel et al. (eds.), Current Protocols in Molecular Biology, John Wiley & Sons, NY (1993); Kriegler, Gene Transfer and Expression, A Laboratory Manual, Stockton Press, NY (1990); and in Chapters 12 and 13, Dracopoli et al. (eds), Current Protocols in Human Genetics, John Wiley & Sons, NY (1994); Colberre-Garapin et al., J. Mol. Biol. 150:1 (1981).

[0258] The expression levels of either an anti-antigen antibody or the encoded polypeptides of the improved LAMP Construct can be increased by vector amplification (for a review, see Bebbington and Hentschel, The Use Of Vectors Based On Gene Amplification For The Expression Of Cloned Genes In Mammalian Cells In DNA Cloning, Vol. 3. (Academic Press, New York, 1987)). When a marker in the vector system expressing an anti-antigen antibody or the encoded polypeptides of the improved LAMP Construct is amplifiable, an increase in the level of inhibitor present in the host cell culture will increase the number of copies of the marker gene. Since the amplified region is associated with the coding sequence, production of the anti-antigen antibody express or the encoded polypeptides of the improved LAMP Construct will also increase (Crouse et al., Mol. Cell. Biol. 3:257 (1983)).

[0259] Other elements that can be included in vector sequences include heterologous signal peptides (secretion signals), membrane anchoring sequences, introns, alternative splice sites, translation start and stop signals, inteins, biotinylation sites and other sites promoting post-translational modifications, purification tags, sequences encoding fusions to other proteins or peptides, separate coding regions separated by internal ribosome reentry sites, sequences encoding “marker” proteins that, for example, confer selectability (e.g., antibiotic resistance) or sortability (e.g., fluorescence), modified nucleotides, and other known polynucleotide cis-acting features not limited to these examples.

[0260] The host cell may be co-transfected with two expression vectors of the invention, for example, the first vector encoding a heavy chain derived polypeptide and the second vector encoding a light chain derived polypeptide. The two vectors may contain identical selectable markers which enable equal expression of heavy and light chain polypeptides. Alternatively, a single vector may be used which encodes, and is capable of expressing, both heavy and light chain polypeptides. In such situations, the light chain is preferably placed before the heavy chain to avoid an excess of toxic free heavy chain (Proudfoot, Nature 322:52 (1986); Kohler, Proc. Natl. Acad. Sci. USA 77:2 197 (1980)). The coding sequences for the heavy and light chains may comprise cDNA or genomic DNA or synthetic DNA sequences.

[0261] Once an anti-antigen antibody or the encoded polypeptides of the improved LAMP Construct has been produced by recombinant expression, it may be purified by any method known in the art for purification of a protein, for example, by chromatography (e.g., ion exchange, affinity (particularly by Protein A affinity and immunoaffinity for the specific antigen), and sizing column chromatography), centrifugation, differential solubility, or by any other standard technique for the purification of proteins. Further, an anti-antigen antibody or the encoded polypeptides of the improved LAMP Construct may be fused to heterologous polypeptide sequences described herein or otherwise known in the art to facilitate purification.

[0262] In one example, the anti-antigen antibody or the encoded polypeptides of the improved LAMP Construct may be fused with the constant domain of immunoglobulins (IgA, IgE, IgG, IgM), or portions thereof (CH1, CH2, CH3, or any combination thereof and portions thereof), or albumin (including but not limited to recombinant human albumin or fragments or variants thereof (see, e.g., U.S. Pat. No. 5,876,969, issued Mar. 2, 1999, EP Patent 0 413 622, and U.S. Pat. No. 5,766,883, issued Jun. 16, 1998), resulting in chimeric polypeptides. Such fusion proteins may facilitate purification and may increase half-life in vivo. This has been shown for chimeric proteins consisting of the first two domains of the human CD4-polypeptide and various domains of the constant regions of the heavy or light chains of mammalian immunoglobulins. See, e.g., EP 394,827; Traunecker et al., Nature, 331:84-86 (1988). Enhanced delivery of an antigen across the epithelial barrier to the immune system has been demonstrated for antigens (e.g., insulin) conjugated to an FcRn binding partner such as IgG or Fe fragments (see, e.g., PCT Publications WO 96/22024 and WO 99/04813). IgG Fusion proteins that have a disulfide-linked dimeric structure due to the IgG portion disulfide bonds have also been found to be more efficient in binding and neutralizing other molecules than monomeric polypeptides or fragments thereof alone. See, e.g., Fountoulakis et al., J. Biochem., 270:3958-3964 (1995). Nucleic acids encoding the anti-antigen antibody or the encoded polypeptides of the improved LAMP Construct described herein can also be recombined with a gene of interest as an epitope tag (e.g., the hemagglutinin (“HA”) tag or flag tag) to aid in detection and purification of the expressed polypeptide. For example, a system described by Janknecht et al. allows for the ready purification of non-denatured fusion proteins expressed in human cell lines (Janknecht et al., 1991, Proc. Natl. Acad. Sci. USA 88:8972-897). In this system, the gene of interest is subcloned into a vaccinia recombination plasmid such that the open reading frame of the gene is translationally fused to an amino-terminal tag consisting of six histidine residues. The tag serves as a matrix-binding domain for the fusion protein. Extracts from cells infected with the recombinant vaccinia virus are loaded onto Ni2+ nitriloacetic acid-agarose column and histidine-tagged proteins can be selectively eluted with imidazole-containing buffers.

### Administration

[0263] Vaccine material according to this invention may contain the immune stimulatory improved LAMP Constructs described herein or may be recombinant microorganisms, or antigen presenting cells which express the immune stimulatory improved LAMP Constructs. Preparation of improved LAMP Constructs containing vaccine material according to this invention and administration of such improved LAMP Constructs for immunization of individuals are accomplished according to principles of immunization that are well known to those skilled in the art.

[0264] Large quantities of these materials may be obtained by culturing recombinant or transformed cells containing replicons that express the improved LAMP Constructs described herein. Culturing methods are well-known to those skilled in the art and are taught in one or more of the documents cited above. The improved LAMP Construct vaccines are generally produced by culture of recombinant or transformed cells and formulated in a pharmacologically acceptable solution or suspension, which is usually a physiologically-compatible aqueous solution, or in coated tablets, tablets, capsules, suppositories or ampules, as described in the art, for example in U.S. Pat. No. 4,446,128, incorporated herein by reference. Administration may be any suitable route, including oral, rectal, intranasal or by injection where injection may be, for example, transdermal, subcutaneous, intramuscular or intravenous.

[0265] The improved LAMP Constructs are administered to a mammal in an amount sufficient to induce an immune response in the mammal A minimum preferred amount for administration is the amount required to elicit antibody formation to a concentration at least 4 times that which existed prior to administration. A typical initial dose for administration would be 10-5000 micrograms when administered intravenously, intramuscularly or subcutaneously, or 10⁵ to 10¹¹ plaque forming units of a recombinant vector, although this amount may be adjusted by a clinician doing the administration as commonly occurs in the administration of vaccines and other agents which induce immune responses. A single administration may usually be sufficient to induce immunity, but multiple administrations may be carried out to assure or boost the response.

[0266] The improved LAMP Construct vaccines may be tested initially in a non-human mammal (e.g., a mouse or primate). For example, assays of the immune responses of inoculated mice can be used to demonstrate greater antibody, T cell proliferation, and cytotoxic T cell responses to the improved LAMP Constructs than to wild type antigen. Improved LAMP Constructs can be evaluated in Rhesus monkeys to determine whether the vaccine formulation that is highly effective in mice will also elicit an appropriate monkey immune response. In one aspect, each monkey receives a total of 5 mg DNA per immunization, delivered IM and divided between 2 sites, with immunizations at day 0 and at weeks 4, 8, and 20, with additional doses optional. Antibody responses, ADCC, CD4+ and CD8+ T-cell cytokine production, CD4+ and CD8+ T-cell antigen-specific cytokine staining can be measured to monitor immune responses to the vaccine.

[0267] Further description of suitable methods of formulation and administration according to this invention may be found in U.S. Pat. No. 4,454,116 (constructs), U.S. Pat. No. 4,681,762 (recombinant bacteria), and U.S. Pat. Nos. 4,592,002 and 4,920,209 (recombinant viruses).

### Cancer Immunotherapy: Candidates for Prevention and Treatment

[0268] The improved LAMP Constructs described herein comprising at least one cancer antigen described in Table 1 can be used to treat patients who have cancer and/or a hyperproliferative disorder. Examples include patients with documented Epstein-Barr virus associated lymphomas, patients with HPV associated cervical carcinomas, patients with chronic HCV, or patients with a defined re-arrangement or mutation in an oncogene or tumor suppressor gene. Further preferred embodiments include patients having hyperproliferative disorders, including cancer, resulting from CMV infection.

[0269] In preferred embodiments, cancers that can be treated using the improved LAMP Constructs described herein include, but are not limited to all stages of progression, including hyperplasia of an adenocarcinoma, sarcoma, skin cancer, melanoma, bladder cancer, brain cancer (including glioblastoma multiforme), breast cancer, uterine cancer, ovarian cancer, prostate cancer, lung cancer (including, but not limited to NSCLC, SCLC, squamous cell cancer), colorectal cancer, anal cancer, rectal cancer, cervical cancer, liver cancer, head and neck cancer, oral cancer, salivary gland cancer, esophageal cancer, pancreas cancer, pancreatic ductal adenocarcinoma (PDA), renal cancer, stomach cancer, kidney cancer, multiple myeloma or cerebral cancer.

[0270] It is envisioned that therapy with an improved LAMP Construct, such as in the case of a vaccine composition comprising the improved LAMP Construct, could be utilized at any period during the course of the individual's cancer, once it is identified. It is also possible that in high risk patients, vaccination in order to prevent the subsequent emergence of a cancer. Protein based LAMP Construct vaccines as well as cell therapy (e.g, dendritic cell therapy comprising LAMP Constructs) are also envisioned.

### Procedure for Therapy

[0271] In one embodiment, the improved LAMP Constructs could be injected into the patient at any suitable time during the course of their malignancy. For example, the improved LAMP Construct comprising at least one cancer antigen described in Table 1 would be injected at a stage when the tumor burden was low. In an alternative embodiment in which the improved LAMP Construct is introduced into the individual's antigen presenting cells (such as, for example, dendritic cells), precursors to the antigen presenting cells or mature antigen presenting cells are drawn either from the individual's bone marrow or peripheral blood by vena puncture. These cells are established in culture followed by transduction with the improved LAMP Construct. Once transduction had occurred, these antigen presenting cells are injected back into the patient.

[0272] In a particularly preferred embodiment, the invention provides a method of treatment for a cancer patient having low tumor burden, such as early in the disease, after resection of a neoplastic tumor, or when the burden of tumor cells is otherwise reduced. In this method, a cell population containing autologous stem cells capable of differentiation into antigen presenting cells which will express MHC class II molecules is obtained from the patient. These cells are cultured and transformed by introducing an improved LAMP Construct to deliver the cancer antigen to be associated with an MHC class II molecule either within the compartment/organelle or within another compartment/organelle to which the antigen is delivered.

[0273] The transfected stem cell population is then reintroduced into the patient, where the stem cells differentiate into antigen presenting cells which express MHC class II molecules complexed with Th epitopes from the antigen. The immune response to the antigen will be enhanced by enhanced stimulation of the helper T cell population.

[0274] More generally, in one embodiment, this invention provides a vaccine composition comprising the improved LAMP Construct for modulating an immune response in a mammal to an antigen (i.e., stimulating, enhancing, or reducing such a response).

### Kits

[0275] The invention further comprises kits to facilitate performing the methods described herein. In one aspect, a kit comprises an improved LAMP Construct as described herein and a cell for receiving the improved LAMP Construct. The kit may additionally comprise one or more nucleic acids for engineering the cell into a professional APC. In one aspect, however, the cell is a professional APC. The cell may or may not express co-stimulatory molecules. In a preferred aspect, when the cell does not express co-stimulatory molecules, the antigen encoded by the improved LAMP Construct is an autoantigen. In another aspect, a panel of cells is provided expressing different MHC molecules (e.g., known to be expressed in human beings). In a further aspect, the kit comprises reagents to facilitate entry of the improved LAMP Constructs into a cell (e.g., lipid-based formulations, viral packaging materials, cells, and the like). In still a further aspect, one or more T cell lines specific for the antigen encoded by the improved LAMP Construct is provided, to verify the ability of the improved LAMP Construct to elicit, modulate, or enhance an immune response.

### EXAMPLES

[0276] The invention will now be further illustrated with reference to the following examples. It will be appreciated that what follows is by way of example only and that modifications to detail may be made while still falling within the scope of the invention.

### Example 1

### Construction of LAMP Constructs

[0277] The improved LAMP Constructs illustrated in FIG. 1 can be constructed using standard molecular biology techniques well known to the skilled artisan. For example, plasmids comprising the polynucleotides can be designed to generate the different structures ILC-1 to ILC-6 shown in FIG. 1. The LAMP domains illustrated in FIG. 1 can be derived from the amino acid sequences shown in FIGS. 3-10. Preferably the LAMP domains are derived from the human LAMP proteins shown in FIGS. 3-10. The boundaries of each domain can be derived from FIG. 2A and FIG. 2B. It is envisioned that the corresponding domains can also be cloned from the orthologous sequences by identifying the equivalent domains when compared to the human sequence. The cancer antigens can be cloned into the described LAMP Constructs either individually or in combination as described in Table 1.

### Example 2

### Immune Response Evaluation of Mice to LAMP Constructs

[0278] The ability of the improved LAMP Constructs as described in Example 1 can be tested for their ability to modulate an immune response. For example, Female BALB/c mice can be immunized i.d with 50 ug of the improved LAMP Constructs and 5 ug of GMCSF in 100 ul PBS using nanopass on day 0, 14 and 28. Experiment will then be terminated 4 weeks after the last dose.

[0279] Splenocytes (3×105/well) are stimulated with antigenic protein (10 ug/ml) in T cell media (RPMI with 10% heat inactivated FBS, 1% penicillin/streptomycin, and 1×2-ME), supernatants are collected 72 h after. Supernatants are diluted (400 ul supernatant+200 ul T cell media) and cytokines are evaluated by ELISA. IL-10 or IL-4 production can be measured via ELISPOT assay.

### Example 3

### Improved Antigen Presentation Using LAMP Constructs

[0280] Survivin is the smallest member of the Inhibitor of Apoptosis (IAP) family of proteins, involved in inhibition of apoptosis and regulation of cell cycle. These functional attributes make Survivin a unique protein exhibiting divergent functions i.e. regulating cell proliferation and cell death. Expression of Survivin in tumors correlates with not only inhibition of apoptosis and a decreased rate of cell death, but also resistance to chemotherapy and aggressiveness of tumors [1-6]. Therefore, Survivin is an important target for cancer vaccines and therapeutics [7-9]. Survivin has also been found to be prominently expressed on both human and embryonic stem cells and many somatic stem cell types indicating its yet unexplored role in stem cell generation and maintenance.

[0281] Cancer is a heterogeneous group of diseases where abnormal cell growth with potential to invade other body parts takes control of normal homeostasis and becomes fatal if not timely and rightly treated. Immunotherapy specifically targets tumor cells thereby avoiding collateral damage to non-tumor cells and inducing anti-tumor response. This anti-tumor response also has the potential to eradicate tumor at distant sites in the body which may not be possible by surgical resection. Induction or enhancement of anti-tumor immune response is a formidable challenge in cancer because tumor cells use multiple evasion strategies and avoid being detected or eliminated by immune cells.

[0282] The aim of this project is to evaluate in vivo immune response of all new generation of LAMP Constructs injected by I.D. in BALB/c mice. Specifically, mice were immunized with 50 tig of the tested constructs defined in the legend of FIG. 1 by intradermal injection. No adjuvants were added at this experiment. Six mice per group were administrated with vaccines every 7 days with total three dose in one month. Immune response was monitored 14 days after the last immunization.

[0283] The tested LAMP constructs were generated as described herein and the sequence of each tested construct is shown in FIG. 19. Survivin protein was purchased from MyBiosource (San Diego, Calif.). Survivin peptides were from GenScript (Piscataway, N.J.). Anti-survivin and m-IgGk-BP-HRP were bought from Santa Cruz Biotechnology (Dallas, Tex.), and mouse Monoclonal anti-LAMP-1/CD107a were from OriGene Technologies (Rockville, Md.). ELISPOT antibody pairs for IFNγ were from Biolegend. Fluorescently coupled CD3, CD4, CD8, CD44, CD62L, IFNγ, TNFα, granzyme B, CD69 monoclonal antibodies and Zombie aqua fixable viability kit were purchased from BioLegend (San Diego, Calif.). Goat anti-mouse IgG2a-HRP and goat anti-mouse IgG-HRP were purchased from Southern Biotechnologies (Birmingham, Ala.). Streptavidin-HRP was purchased from Thermo Fisher (Waltham, Mass.). SureBlue TMB microwell peroxidase substrate and TMB stop solution were purchased from KPL (Gaithersburg, Md.).

[0284] 50 μg of each construct was used in a total volume of 100 ul per mouse per dose for Pharmajet. Mice were immunized with the vaccine by i. d. delivery on days 0, 7, and 14. Mice were bled on days 28 for serum collection. Serum was collected and stored in −30° C. Spleens were collected on day 28 at the termination of experiment and processed for ELISPOT and FACS to evaluate survivin specific T cell responses.

[0285] Measurement of plasma survivin-specific total IgG by ELISA. The murine antibody response to survivin was assessed by indirect ELISA. ELISA plates (MaxiSorp) were coated with 2 μg/ml survivin (1-142) protein in carbonate-bicarbonate buffer overnight and then blocked with 2% BSA in PBS. Plasma samples were diluted 1:100 in blocking buffer. Samples were detected with goat anti-mouse IgG-HRP (Southern Biotech, Birmingham, Ala.). Reaction was developed with SureBlue TMB Substrate and stopped with TMB Stop Solution from KPL (Gaithersburg, Md.). Plates were read (OD450) by using Epoch ELISA reader (BioTek, Winooski, Vt.).

[0286] Evaluation of antigen-specific T cell response. To assess antigen-specific T cell response in the vaccinated mice, splenocytes from vaccinated mice were evaluated for antigen-specific IFNγ production by Enzyme-linked immunospot (ELISPOT). For ELISPOT assays, 96-well nitrocellulose plates (Millipore), were coated overnight at 4° C. with 100 μl/well of capture monoclonal antibody in PBS. The plates were washed three times with 200 μl/well PBS and blocked with 200 μl/well T cell media for at least 2 hrs at room temperature. Splenocytes were plated at 3×10⁵ cells/well and co-cultured with 2 μg/ml pooled peptides of Survivin (Table 2) or concavalin A (0.125 μg/ml) or medium alone in a total volume of 200 μl/well T cell media (RPMI-1640 with L-Glutamine and HEPES (ATCC), 1% penicillin, 1% streptomycin, and 5×10⁻⁵M β-ME) at 3×10⁵ cells/well for 48 h at 37° C. in 5% CO₂. The plates were washed two times with 200 μl/well PBS and two times with 200 μl/well PBS-T (0.05% Tween/PBS). Diluted detection antibodies (50 μl/well in PBS-T/0.5% BSA) were added and plates were incubated for 2 hrs with shaking at room temperature. Plates were washed four times with PBS. Streptavidin-alkaline phosphatase diluted in PBS (50 μl/well) were added and incubated for 2 h. Plates were washed with PBS four times and developed with 50 μl/well of 3-Amino-9-Ethylcarbazole (AEC, BD Bioscience) substrate for 10 min. Color development was stopped by washing under running tap water. After drying 72 h at room temperature in dark, colored spots were counted using an AID ELISPOT High-Resolution Reader System and AID ELISPOT Software version 3.5 (Autoimmun Diagnostika GmbH).

TABLE 2
Pooled peptides from Genscript

| | |
|---|---|
| Pooled P1 | Sur1-15, Sur11-25, Sur 21-35, Sur31-45, sur 41-55 |
| Pooled P2 | Sur51-65, sur61-75, sur71-85, sur81-95 |
| Pooled P3 | Sur91-105, sur 101-115, sur111-125, sur121-135, sur131-142 |
| Pooled P4 | Sur31-45, sur41-55 and sur51-65 |

[0287] Western blots. 293T cells were transfected with the tested constructs using lipofectamine 2000 reagents (Invitrogen). Transfected cells were washed with PBS and suspended in 200 μl of RIPA lysis buffer with halt proteinase inhibitors (Thermo Scientific, Waltham, Mass.). Lysates were centrifuges (700 g for 15 minutes at 4° C.), followed by measurement of protein concentration in the clarified supernatants using Pierce BCA protein Assay kit (ThermoFisher Scientific, Waltham, Mass.). 10 μg of protein was electrophoresed in pre-cast (4-20%) SDS-PAGE gels (BioRad, Hercules, Calif.), and transferred onto nitrocellulose membranes (BioRad) and immunoblotted with mAbs to hLAMP. Membranes were blocked with Detection™ block buffer (KPL) and probed with rabbit anti-human LAMP (Sino Biological Inc., Beijing, China) or anti-survivin antibody and goat anti-rabbit-HRP antibody, and then developed with TMB (KPL).

[0288] Flow cytometry. Cells were first labelled with Zombie aqua fixable viability dye in PBS (1:500 dilution), followed by surface antibodies (1:100 dilution) in staining buffer (4% FBS, 2% rat serum, 2% mouse serum in PBS). For intracellular staining cells were stained with Zombie aqua, followed by surface staining, fixation with 4% paraformaldehyde, and stained with intracellular antibody in permeabilization buffer (PBS with 1% FCS 0.1% saponin). Samples were analyzed on a CytoFlex flow cytometer (Beckman Coulter) and analyzed using Kaluza software (Beckman Coulter).

[0289] Statistics. Two-Way ANOVA test was performed using GraphPad Prism 6.0 software or R file to evaluate the statistical significance. Each mouse's RPMI result was deducted from the results of the antigen activation.

[0290] Vaccines, and immunizations. Control, Survivin+Complete LAMP, Survivin-ILC-1 Construct, Survivin-ILC-2, Survivin-ILC-3, and Survivin-ILC-4 Construct vaccines were used in a total volume of 25 μl per mouse per dose. Mice were immunized with the vaccine by ID delivery on days 0, 7, and 14. Mice were bled on days −13, and 28 for serum collection. Serum was collected and stored in −30° C. Spleens were collected on day 28 and processed for ELISPOT/ELISA assays.

[0291] FIG. 14: Validation of the plasmids: 293T cells were transfected with the plasmids for 3 days. Transfected cells were lysed, and then electrophoresed in pre-cast SDS-PAGE gel. The proteins were transferred to nitrocellulose membranes and immunoblotted with mAbs to human LAMP (OriGene, #TA337108) or survivin Santa Cruz #17779). Molecular weight of LAMP=100 KD, Survivin=16 KD. FIG. 13 shows that all tested LAMP constructs produced appropriately sized protein.

[0292] FIGS. 15 and 16: Tested LAMP Constructs induce Th1 effector T cells producing IFNγ. Female BALB/c mice were immunized i.d with 50 μg of the indicated constructs in 100 μl PBS via Pharmajet device on day 0, 7 and 14. Experiment was terminated 14 days after the last dose. Splenocytes (3×10⁵/well) were stimulated with survivin pooled peptides (4 μg/ml) in T cell media (RPMI with 10% heat inactivated FBS, 1% penicillin/streptomycin, and 1×β-ME), for 48 h. A. IFNγ production by spots. B. IFNγ production induced by all pooled peptides (bar figure from A). n=6 per group. Two way ANOVA (R file) was used for statistical analysis. FIG. 14 shows that all tested LAMP constructs induced a robust T cell response as shown by IFNγ production.

[0293] We unexpectedly found that after 3 dose of the improved LAMP Constructs (one week apart), a robust Th1 type response elicited by tested LAMP Constructs, especially ILC-4 where the hinge sequence was replaced by Survivin gene. More interestingly, improved LAMP Construct ILC-4 appears to recognize the Survivin epitopes from N-terminal to C-terminal, and induce T cell response against human Survivin peptide sequence which is 100% identical to the mouse. We also found longer (72 hrs) stimulation of frozen-thawed splenocyte cells with Survivin peptides, ILC-4 showed significant higher IFNγ production than the first generation of LAMP-Survivin (see FIG. 19). Specifically, FIG. 16 shows that the all improved LAMP Constructs tested showed higher T cell response with ILC-4 having the best activity as this constructed elicited a significantly higher T cell response against all Survivin peptides pools. Moreover, contrary to what was known in the art, removal of the second homology domain of the luminal domain created an improved LAMP construct that elicited a more robust immune response as compared to the complete LAMP construct (see, results for ILC-2 and ILC-3). Frozen splenocytes (4×105/well) were stimulated with pooled peptides 4 (4 μg/ml) in T cell media (RPMI with 10% heat inactivated FBS, 1% penicillin/streptomycin, and 1×β-ME), for 48 h. n=6 per group. Two way ANOVA was used for statistical analysis. *p<0.05, **p<0.01, ***p<0.005, ****p<0.0001 FIG. 17. CD4 T cells are the major source of IFNγ producing cells. Female BALB/c mice were immunized i.d with 50 μg of the indicated vaccines in 100 μl PBS via Pharmajet device on day 0, 7 and 14. Experiment was terminated 14 days after the last dose. Splenocytes (1×10⁶/well) were stimulated with pooled peptides 1 (4 μg/ml) in T cell media (RPMI with 10% heat inactivated FBS, 1% penicillin/streptomycin, and 1×β-ME) over night, followed by adding monesin and brefeldin A and culturing for additional 5 h. Cells were harvested and stained by Zombie, surface marker, and intracellular staining according to ITI staining protocol. Cells are gated on memory CD4 T cells (CD4+CD44+CD62L-) or CD8 T cells (CD8+CD44+CD62L-). Data is representative of one mouse in each group. While there is an increase in CD8 effector memory cells in vaccinated mice with the various constructs, IFNγ production is more pronounced in the CD4 T cell population.

[0294] FIG. 18: Improved LAMP Constructs produced stronger Survivin-specific total IgG response in BALB/c mice. Female BALB/c mice were immunized i.d with 50 μg of the indicated vaccines in 100 μl PBS via Pharmajet device on day 0, 7 and 14. Experiment was terminated 14 days after the last dose. Mice were bleed on days 28. Serum was separated and stored in −30° C. Total IgG and IgG2a were determined in serum by ELISA. Briefly, ELISA plates were coated with 2 μg/ml Survivin (1-142aa), blocked with PBS/2% BSA, serum (1:100 dilution in blocking buffer) were evaluated by HRP-conjugated goat anti mouse IgG (1:6000) and IgG2a (1:11000). n=6 mice per group. **p<0.01, ***p<0.005, ****p<0.0001. Importantly and contrary to what was known in the art, FIG. 18 shows that fragments of the luminal domain worked better than use of the complete luminal domain (i.e., compare complete LAMP construct with constructs ILC-2 and IL-3). Unexpectedly, insertion of the antigen between the two homology domains of the luminal domain generated the strongest antibody response (see, ILC-4).

### REFERENCES RELIED ON IN THIS SECTION

[0295] 1. Kami K, Doi R, Koizumi M, Toyoda E, Mori T, Ito D, et al. Survivin expression is a prognostic marker in pancreatic cancer patients. Surgery. 2004; 136(2):443-8. doi: 10.1016/j.surg.2004.05.023. PubMed PMID: 15300213.
[0296] 2. Zhang S Q, Qiang S Y, Yang W B, Jiang J T, Ji Z Z. [Expression of survivin in different stages of carcinogenesis and progression of breast cancer]. Ai Zheng. 2004; 23(6):697-700. PubMed PMID: 15191674.
[0297] 3. Zhang X, Zhong L, Hu K, Li Q. [Expression of survivin and its correlation with apoptosis in non-small cell lung cancer]. Zhongguo Fei Ai Za Zhi. 2004; 7(2):138-41. doi: 10.3779/j.issn.1009-3419.2004.02.14. PubMed PMID: 21215009.
[0298] 4. Kishi H, Igawa M, Kikuno N, Yoshino T, Urakami S, Shiina H. Expression of the survivin gene in prostate cancer: correlation with clinicopathological characteristics, proliferative activity and apoptosis. J Urol. 2004; 171(5):1855-60. doi: 10.1097/01.ju.0000120317.88372.03. PubMed PMID: 15076293.
[0299] 5. Asanuma K, Tsuji N, Endoh T, Yagihashi A, Watanabe N. Survivin enhances Fas ligand expression via up-regulation of specificity protein 1-mediated gene transcription in colon cancer cells. J Immunol. 2004; 172(6):3922-9. PubMed PMID: 15004200.
[0300] 6. Miyachi K, Sasaki K, Onodera S, Taguchi T, Nagamachi M, Kaneko H, et al. Correlation between survivin mRNA expression and lymph node metastasis in gastric cancer. Gastric Cancer. 2003; 6(4):217-24. doi: 10.1007/s10120-003-0255-2. PubMed PMID: 14716515.
[0301] 7. Badana A K, Chintala M, Gavara M M, Naik S, Kumari S, Kappala V R, et al. Lipid rafts disruption induces apoptosis by attenuating expression of LRP6 and survivin in triple negative breast cancer. Biomed Pharmacother. 2017; 97:359-68. doi: 10.1016/j.biopha.2017.10.045. PubMed PMID: 29091885.
[0302] 8. Cai J P, Wang Y D, Zhang X, Xue H Z. [Expression of P16 and survivin in liver cancer and their clinical significance]. Zhonghua Gan Zang Bing Za Zhi. 2017; 25(10):778-80. doi: 10.3760/cmaj.issn.1007-3418.2017.10.013. PubMed PMID: 29108210.
[0303] 9. Cho H J, Kim H R, Park Y S, Kim Y H, Kim D K, Park S I. Prognostic value of survivin expression in stage III non-small cell lung cancer patients treated with platinum-based therapy. Surg Oncol. 2015; 24(4):329-34. doi: 10.1016/j.suronc.2015.09.001. PubMed PMID: 26690822.
[0304] 10. Godinho R M, Matassoli F L, Lucas C G, Rigato P O, Goncalves J L, Sato M N, et al. Regulation of HIV-Gag expression and targeting to the endolysosomal/secretory pathway by the luminal domain of lysosomal-associated membrane protein (LAMP-1) enhance Gag-specific immune response. PLoS One. 2014; 9(6):e99887. doi: 10.1371/journal.pone.0099887. PubMed PMID: 24932692; PubMed Central PMCID: PMCPMC4059647.

### Example 4

### Therapeutic Treatment of LAMP Constructs

[0305] Female BALB/c mice can be inoculated s.c with syngeneic 7000 4T1 mammary carcinoma cells on day 0. Vaccine 50 ug and 5 ug of GMCSF in 100 ul PBS is given i.d using nanopass once the tumors are palpable. Primary tumors are measured with a caliper and tumor volume is calculated using the formula p/6 (length×width)3/2. Average tumor volume as a function of days after tumor inoculation can be measured. A Kaplan-Meier plot can be used to show overall survival at the point of termination.

### Example 5

### Prime/Boost Protocol

[0306] Herpesvirus entry mediator (HVEM), also known as tumor necrosis factor receptor superfamily member 14 (TNFRSF14) or CD270, is a human cell surface receptor of the TNF-receptor superfamily In recent years, HVEM has been found highly expressed on hematopoietic cells and a variety of parenchymal cells, such as breast, melanoma, colorectal, and ovarian cancer cells, as well as gut epithelium. HVEM is a bidirectional protein, either inhibiting or stimulating T cells, through binding to BTLA or LIGHT (TNFSF14).

[0307] We generated a DNA vaccine encoding HVEM-LAMP to generate an antibody which could block the inhibitory function of HVEM for tumor therapeutic applications. We hypothesized that LAMP will promote the antibody response by enhancing the affinity of HVEM specific antibodies and/or expanding the repertoire of B cell epitopes in the HVEM protein. In this study, we compared the immunogenicity of HVEM encoding plasmid with and without LAMP (SEQ ID NO: 158 and SEQ ID NO:159). Plasmids encoding HVEM-LAMP and HVEM and recombinant HVEM protein were designed as described herein.

[0308] Goat anti-mouse IgG-HRP was purchased from Southern Biotechnologies (Birmingham, Ala.). SureBlue TMB microwell peroxidase substrate and TMB stop solution were purchased from KPL (Gaithersburg, Md.). ELISPOT plates were ordered from EMD Millipore (Billerica, Mass., Cat. No. MAIPS4510). IFN-γ antibody pair used in ELISPOT was purchased from BioLegend (San Diego, Calif.) and clones AN18 and R46A2 were used as coating and detection, respectively. Streptavidin-HRP and AEC substrate were purchased from BD Biosciences (San Jose, Calif.).

[0309] Six to eight week old female Balb/c mice were purchased from Harlan Laboratories (Frederick, Mass.) and maintained at animal facility in Immunomic Therapeutics, Inc. (Rockville, Mass.). Mice (n=6) were treated with 10 μg/dose of HVEM-LAMP, HVEM, or LAMP vector control by electroporation IM delivery at days 0, 7, and 14. On day 35, mice were boosted with 5 μg HVEM protein in the presence of Alum by i.p. injection. On day 28 and 49, mice were bled and sera were isolated for antibody detection. Mice were sacrificed on day 56 and splenocytes were tested for IFN-γ production by ELISPOT.

[0310] ELISA procedure was followed by Su et al., J of Immunol Res; (10):1-15 (2016). Plates were coated with 5 μg/ml HVEM protein. Data were analyzed by using Microsoft Excel and Prism 6 software.

[0311] The primary aim of this study was to compare the antibody profiles between HVEM-LAMP and HVEM. On day 28, HVEM-LAMP vaccinated mice produced significant higher level of HVEM specific IgG antibody than that of the HVEM group (FIG. 11). After a protein boost, the HVEM specific antibody was increased about 1000-fold in HVEM immunized mice and the mean titer was changed from 100 to 108000. This result indicates that the immune memory was induced by the HVEM DNA plasmid. Although HVEM DNA alone only induced a minimal antibody response, protein boost rapidly recalled the immune memory. On the other hand, HVEM-LAMP group again exhibited a significant higher titer than the HVEM and LAMP groups, the mean titer is 5 folds of the HVEM group, indicating the power of LAMP in enhancing antibody response (FIG. 12).

[0312] Additionally serum samples (Day 49) from HVEM+LAMP or HVEM alone immunized/HVEM protein boosted mice were pooled and tested for peptide mapping. Twelve peptides were found to be bound to the pooled serum (mouse IgG reaction) and seven of the twelve peptides showed strong binding affinity. HVEM+LAMP alters the binding affinity of peptides 17, 24, 25, and 28 as compared to HVEM alone as shown in FIG. 13. These changes may have physiological effects in protecting tumor growth.

[0313] In conclusion, data from this study suggest that two constructs were expressed in vivo and LAMP significantly improved the humoral immune response.

### Example 6

### Production of an Antibody from a Polypeptide

[0314] Anti-antigen antibodies can be prepared by a variety of standard methods of raising antibodies using animal injection. (See, Current Protocols, Chapter 2.) For example, cells expressing an improved LAMP Construct comprising a cancer antigen described herein is administered to a non-human vertebrate to induce the production of sera containing polyclonal antibodies. In a preferred method, a preparation of the LAMP/antigen protein is prepared and purified to render it substantially free of natural contaminants. Such a preparation is then introduced into the non-human vertebrate to produce polyclonal antisera of greater specific activity.

[0315] In the most preferred method, the anti-antigen antibodies of the present invention are monoclonal antibodies (or protein binding fragments thereof). Such monoclonal antibodies can be prepared using hybridoma technology. (Kohler et al., Nature 256:495 (1975); Kohler et al., Eur. J. Immunol. 6:511 (1976); Kohler et al., Eur. J. Immunol. 6:292 (1976); Hammerling et al., in: Monoclonal Antibodies and T-Cell Hybridomas, Elsevier, N.Y., pp. 563-681 (1981).) In general, such procedures involve immunizing a non-human vertebrate animal (preferably a rabbit, mouse, cow, camel, llama) with an improved LAMP Construct comprising an antigen, the encoded polypeptide of an improved LAMP Construct comprising an antigen or, more preferably, with an improved LAMP Construct-expressing cell. Such cells may be cultured in any suitable tissue culture medium; however, it is preferable to culture cells in Earle's modified Eagle's medium supplemented with 10% fetal bovine serum (inactivated at about 56 degrees C.), and supplemented with about 10 g/l of nonessential amino acids, about 1,000 U/ml of penicillin, and about 100 ug/ml of streptomycin.

[0316] The splenocytes of such non-human vertebrate host (e.g, mice) are extracted and fused with a suitable myeloma cell line. Any suitable myeloma cell line may be employed in accordance with the present invention; however, it is preferable to employ the parent myeloma cell line (SP20), available from the ATCC™. After fusion, the resulting hybridoma cells are selectively maintained in HAT medium, and then cloned by limiting dilution as described by Wands et al. (Gastroenterology 80:225-232 (1981).) The hybridoma cells obtained through such a selection are then assayed to identify clones which secrete antibodies capable of binding the antigen.

[0317] It will be appreciated that Fab and F(ab′)2 and other fragments of the anti-antigen antibodies may be used according to the methods disclosed herein. Such fragments are typically produced by proteolytic cleavage, using enzymes such as papain (to produce Fab fragments) or pepsin (to produce F(ab′)2 fragments). Alternatively, secreted protein-binding fragments can be produced through the application of recombinant DNA technology or through synthetic chemistry.

[0318] For in vivo use of antibodies in humans, it may be preferable to use “humanized” chimeric monoclonal antibodies. Such antibodies can be produced using genetic constructs derived from hybridoma cells producing the monoclonal antibodies described above. Methods for producing chimeric antibodies are known in the art. (See, for review, Morrison, Science 229:1202 (1985); Oi et al., BioTechniques 4:214 (1986); Cabilly et al., U.S. Pat. No. 4,816,567; Taniguchi et al., EP 171496; Morrison et al., EP 173494; Neuberger et al., WO 8601533; Robinson et al., WO 8702671; Boulianne et al., Nature 312:643 (1984); Neuberger et al., Nature 314:268 (1985).)

### Example 7

### Use of Polynucleotides to Generate Polyclonal and Monoclonal Antibodies

[0319] Methods of directly injecting polynucleotides into animals are well described in the art. See, for example, U.S. Pat. Nos. 5,676,954; 6,875,748; 5,661,133. For example, a polynucleotide encoding an improved LAMP Construct comprising an antigen can be injected into the quadriceps muscles of restrained awake mice (female 6-12 week old BALB/c or Nude, nu/nu, from Harlan Sprague Dawley, Indianapolis, Ind.). In one embodiment, 50 μg of a polynucleotide in 50 μl solution using a disposable sterile, plastic insulin syringe and 28 G ½ needle (Becton-Dickinson, Franklin Lakes, N.J., Cat. No. 329430) fitted with a plastic collar cut from a micropipette tip can be used to inject the mice, as described in Hartikka, J., et al., Hum. Gene Ther. 7:1205-1217 (1996)).

[0320] Alternatively, 6-week old Sprague Dawley female mice (body weight 20-25 grams) can be given 5000 ppm ZnOSO4 in their drinking water beginning 24 hours prior to injection. This amount of zinc has been shown to be able to activate the metallothionein promoter. Each mouse is then injected intravenously through a tail vein puncture with a 25 gauge needle with 30 μg of a polynucleotide encoding an improved LAMP Construct comprising an antigen complexed with 150 μg liposome (Lipofection™) in a total volume of 30 μl. Animal care should be maintained throughout the study and should be performed in compliance with the “Guide for the Use and Care of Laboratory Animals”, Institute of Laboratory Animal Resources, Commission on Life Sciences, National Research Council, National Academy Press.

[0321] After the injected polynucleotide encoding the improved LAMP Construct comprising an antigen is delivered into the cells in the animal, the antigen is delivered to the endosome/lysosome, processed and presented to the immune system. The improved LAMP Construct comprising an antigen can then stimulate the production of antibodies specific to the antigen. These antibodies can be isolated and used as a polyclonal mixture or further isolated into single species or monoclonals. The process of the immune response and production of antibodies against foreign antigens in vivo are well known in the art.

[0322] In a third animal model, Balb/c 3T3 A31 cells are transfected by electroporation with a polynucleotide encoding an improved LAMP Construct comprising an antigen. G418 resistant clones expressing LAMP Construct comprising an antigen are identified by their ability to bind human RBC. To generate polyclonal antibodies, Balb/c mice are immunized twice intraperitoneally, at an interval of 14 days, with 10⁷ cells comprising the improved LAMP Construct comprising an antigen. After a final boost, the immune serum is collected, IgG is purified by protein G Sepharose and passed over an antigen column prepared by coupling 1.0 mg purified antigen to cyanogen bromide activated Sepharose CL-4B. Bound IgG can be eluted with 0.1 M glycine buffer pH 2.5 and neutralized with 0.1 volumes of 0.1 M Tris pH 8.0. To generate a monoclonal antibody (mAb), Balb/c mice are immunized with LAMP Construct comprising an antigen and hybridomas are generated by fusing immune spleen cells with the SP2 myeloma following standard methods (28). A positive well reacting specifically with an antigen can be identified by enzyme-linked immunosorbent assays as described in the art. The hybridoma is cloned three times by limiting dilution to produce an antibody.

### Example 8

### Immunization of an Improved LAMP Construct Comprising an Antigen

[0323] Methods of raising antibodies in mammals are well known in the art. In one example, polyclonal antiserum against a LAMP Construct comprising an antigen is raised by immunization of pathogen free rabbits with a total of 500 μg of an improved LAMP Construct comprising an antigen over a period of two months. For example, the improved LAMP Construct comprising an antigen can be dissolved in PBS and emulsified with an equal volume of Freund's adjuvant. After the final booster, the serum of the rabbits can be separated to determine the titer of the polyclonal antiserum.

[0324] In an additional animal model, groups of 5 mice (C57BL/6J; Jackson Labs) can be subcutaneously immunized with 5 μg of endotoxin-free LAMP Construct comprising an antigen emulsified in alum. Three weeks later, mice are bled and the presence of anti-antigen specific antibodies can be determined by titering the seras by ELISA (direct binding of antibodies in sera to wild type BPTI or APP-KI coated, directly or indirectly (via a biotinylated tag and streptavidin), on the wells).

[0325] To obtain monoclonal antibodies, 4-6 week old Balb/c mice can be immunized with an improved LAMP Construct comprising an antigen (for example 4 times with 2 week intervals with 10-100 μg/injection dissolved in Freunds complete adjuvant for the first injection, and Freund's incomplete adjuvant for subsequent immunizations). Splenocytes are isolated and fused with a fusion cell line such as Sp2/0 myeloma cells, followed by limiting dilution. Growing clones are screened using for example an enzyme-linked immunosorbant assay (ELISA). 96 cells plates are coated with an improved LAMP Construct comprising an antigen or with a control protein. The culture supernatant is added, followed by washing and addition of a labeled anti-mouse antibody for detection. After limited dilution cloning of the anti-antigen antibody producing stable hybridomas are obtained. From each cell, supernatant is collected and by affinity chromatography using protein A sepharose columns monoclonal antibodies can be purified.

### Example 9

### LAMP Constructs with IGFBP-2

[0326] Cancer vaccine development has been pursued for more than 4 decades. However, despite numerous clinical studies of a variety of cancer vaccine formulations, therapeutic cancer vaccination has had overall clinical benefit of about 20%^{1, 2, 3, 4, 5}. Obstacles to improve efficacy have included a) poor immunogenicity of self-proteins that are cancer associated antigens, b) induction of regulatory T cells⁶, and c) low immune response obtained by vaccination. Recent reports suggest a correlation of vaccine-induced Th1 immune infiltrate in tumor microenvironment with improved clinical response in many tumors^{7, 8, 9, 10, 11}.

[0327] Insulin-like growth factor binding protein 2 (IGFBP-2) is a self-protein elevated during progression of many human tumors. IGFBP-2 overexpression is correlated with high-grade gliomas with poor prognosis¹² and is an independent indicator of malignancy in breast cancer patients¹³. IGFBP2 is associated with metastasis and poor survival in lung cancer patients¹⁴. IGFBP2 overexpression is also correlated with advanced disease in adrenal cancer¹⁵, bladder cancer¹⁶, gastric cancer¹⁷, ovarian cancer¹⁸, ¹⁹, and prostrate cancer^{20, 21}

### Materials and Methods

[0328] Mice. Six to eight week old female C57BL/6 albino mice were purchased from Envigo and maintained at animal facility in Immunomic Therapeutics, Inc. (Rockville, Mass.).

[0329] Reagents and antibodies. Control vector Control, IGFBP2 (1-328)-no LAMP, and IGFBP2 (39-328)-ILC-1 Construct were made as described herein using standard protocols. Anti-mouse rabbit IGFBP2 PoAb was from MyBiosource (San Diego, Calif.), goat anti-rabbit IgG-FITC was from e-biosciences (San Diego, Calif.), rabbit anti-human LAMP was from Sino Biological (Beijing, China). Goat anti-rabbit-HRP, goat anti-mouse IgG1-HRP and goat anti-mouse IgG2a-HRP were purchased from Southern Biotechnologies (Birmingham, Ala.). Streptavidin-HRP were purchased from Thermo Fisher (Waltham, Mass.). SureBlue TMB microwell peroxidase substrate and TMB stop solution were purchased from KPL (Gaithersburg, Md.). ELISPOT antibody pairs for IFNγ, and IL-10 was from BioLegend. Cytokine ELISA kits were from R&D systems.

[0330] Vaccines, and immunizations. Control, IGFBP2 (39-328)-ILC-1 Construct, and IGFBP2 (1-328)-no LAMP vaccines were used in a total volume of 20 μl per mouse per dose. Mice were immunized with the vaccine by IM delivery via electroporation on days 0, 7, and 14. Mice were bled on days −13, and 28 for serum collection. Serum was collected and stored in −30° C. Spleens were collected on day 28 and processed for ELISPOT/ELISA assays.

[0331] Measurement of serum IGFBP-2-specific IgG by ELISA. The murine antibody response to IGFBP-2 was assessed by indirect ELISA. ELISA plates (MaxiSorp) were coated with 5 ug/ml IGFBP2 (39-328) protein in carbonate bicarbonate buffer overnight and then blocked with 2% BSA in PBS. Serum samples were diluted (1:100, 1:300, 1:900, 1:2700, 1:8100, 1:24300, 1:72900, 1:218700) in PBS-T. Samples were detected with 1:6000 goat anti-mouse IgG-HRP (Southern Biotech, Birmingham, Ala.), followed by Streptavidin-HRP (Thermo Fisher Scientific, Rockford, Ill.). Reaction was developed with SureBlue TMB Substrate and stopped with TMB Stop Solution from KPL (Gaithersburg, Md.). Plates were read (OD450) by using Epoch ELISA reader (BioTek, Winooski, Vt.). Average background (PBS only) was calculated, and samples which have OD450 value more than 2*average background were considered as positive. The dilutions of such samples are determined as the endpoint titers.

[0332] Evaluation of antigen-specific T cell response. To assess antigen-specific T cell response in the vaccinated mice, splenocytes from vaccinated mice were evaluated for antigen-specific IFNγ, and IL-10 by Enzyme-linked immunospot (ELISPOT).

[0333] Splenocytes were depleted of RBCs and co-cultured in flat bottom 96-well plates in 200 μl/well T cell media (RPMI-1640 with L-Glutamine and HEPES (ATCC), 1% penicillin, 1% streptomycin, and 5×10⁵M 2-ME) at 4×10⁵ cells/well and 10 μg/ml IGFBP2 (39-328) protein or concavalin A (0.25 μg/ml) or medium alone for 72 h at 37° C. in 5% CO₂. Plates were centrifuged at 1600 rpm for 6 minutes and supernatants were collected and stored at −30° C.

[0334] For ELISPOT assays were performed as described herein. Briefly, 96-well nitrocellulose plates (Millipore), were activated with 30 ul of 35% ethanol for one minute, washed with PBS twice, and coated overnight at 4° C. with 50 μl/well of capture monoclonal antibody in PBS. The plates were washed three times with 200 μl/well PBS and blocked with 200 μl/well T cell media for at least 2 hrs at room temperature. Splenocytes were plated at 4×10⁵ cells/well and co-cultured with 10 μg/ml IGFBP2 (39-328) protein or 10 ug/ml peptide pools or concavalin A (0.25 μg/ml) or medium alone in a total volume of 200 μl/well T cell media for 48 h at 37° C. in 5% CO₂. The plates were washed, diluted detection antibodies (50 μl/well) were added and plates were incubated for 2 hrs at room temperature on shaker. Plates were washed four times with PBS. Streptavidin-HRP diluted in PBS (50 μl/well) were added and incubated for 1 h. Plates were washed with PBS and developed with 50 μl/well AEC development solution for up to 30 min. Color development was stopped by washing under running tap water. After drying 24-72 h at room temperature in dark, colored spots were counted using an AID ELISPOT High-Resolution Reader System and AID ELISPOT Software version 3.5 (Autoimmun Diagnostika GmbH).

[0335] Evaluation of intracellular cytokine. To determine the cells responsible for production of cytokines intracellular staining was performed. Splenocytes were depleted of RBCs stored in refrigerator for 24 h. Next day splenocytes were co-cultured in flat bottom 96-well plates in 200 ul/well T cell media (RPMI-1640 with L-Glutamine and HEPES (ATCC), 1% penicillin, 1% streptomycin, and 5×10−5M 2-ME) at 3×10⁶ cells/well and 20 ug/ml IGFBP2 (39-328) protein or peptide pool or medium alone. A mixture of Brafeldin A and monensin (×1000) was added to each well in 20 ul volume (0.22 ul per well for 20 ul volume; prepare a stock for all the wells) one hour later. PMA/ionomycin activation cocktail was added to positive control wells along with BFA and Monensin (Two wells were set-up; one for IgG control and other one for cytokine staining). Cells were incubated for total of 6 h at 37° C. in 5% CO₂.

[0336] Cells were washed with 200 μl PBS. Cells were stained with 50 ul of diluted Zombie aqua dye (1:500 dilution of zombie aqua in PBS) and incubated for 20 min at room temperature protected from light. Cells were washed once with 2% serum in PBS. 20 ul of purified anti-mouse CD16/32mAb (clone 2.4G2; 1 ug/20 ul) was added to the cells and cells were incubated at 4° C. for 10 mins. Cells were centrifuged (2000 rpm, 6 min), supernatant was decanted, and extracellular antibodies were added in PBS supplemented with 2% serum. The antibodies were 0.3 ul of each/well. Abs were added in a volume of 50 μl/well, incubated for 30 min in 4° C. (the CD3 clone 17A2 can activate T cells so 4° C. temperature is important).

[0337] Cells were washed with PBS+protein (2% FCS), fixed and permeabilized with 100 μl of CytoFix/CytoPerm solution at 4° C. for 30 mins (mixed thoroughly with the multichannel when adding the fix buffer to reduce aggregates and doublets formation). Cells were washed with 200 μl Perm/Wash buffer (1×) twice (2000 rpm, 6 min). Cells were stained with the intracellular staining Ab at 0.5 μl Ab/well in Perm buffer. One of the PMA/ionomycin wells were stained with the isotype controls. After 1 h (or overnight) incubation cells were washed twice with perm buffer, and cells were acquired by flow cytometer. While acquisition the events/second were less than 8000. Acquired >10⁶ cells per sample. The acquired data were analyzed using Kaluza analysis software. Dead cells and doublets were gated out.

[0338] Statistics. Statistical analyses were performed by using Prism 6 software (GraphPad Software, La Jolla, Calif.). Data were analyzed by one-way ANOVA followed by Tukey's test for multiple comparisons. p values below 0.05 were considered to indicate a statistically significant difference.

[0339] Results. FIG. 21: IGFBP2 (39-328)-ILC-1 Construct induced significantly higher IFNγ producing effector T cells at the dose of 10 ug IM/EP immunization. Peptide pool 1 induced the IFNγ response similar to IGFBP-2 full length protein indicating dominant epitope in peptide pool 1. Splenocytes (4×10⁵/well) were stimulated with IGFBP-2 protein (10 ug/ml) or peptide pool (10 ug/ml) in T cell media (RPMI with 10% heat inactivated FBS, 1% penicillin/streptomycin, and 1×2-ME), for 48 h. Values in dot plot are experimental—media for each mouse. N=7 mice per group. FIG. 21A. Dot plot to show recall with IGFBP2 full length (10 ug/ml) and FIG. 21B. Dot plot to show recall with peptide pool 1 (10 ug/ml). * indicates p<0.05.

[0340] FIG. 22. IGFBP2 (39-328)-ILC-1 Construct induced IFNγ and/or TNFα producing CD4+ and CD8+ effector memory T cells at the dose of 10 ug IM/EP immunization. Splenocytes (4×10⁵/well) were stimulated with IGFBP-2 protein (10 ug/ml) or peptide pool 1 (5 ug/ml) in T cell media (RPMI with 10% heat inactivated FBS, 1% penicillin/streptomycin, and 1×2-ME), for 6 hr. Cells were stained for intracellular cytokines as described and analyzed as shown below. Representative data from each group.

[0341] FIG. 23: IGFBP-2-specific IgG production in C57BL/6 albino mice immunized with IGFBP2 (39-328)-ILC-1 Construct by IM/EP. Female C57BL/6 albino mice were immunized IM/EP with 10 ug of the indicated vaccines in 20 μl PBS on day 0, 7, and 14. Mice were bleed on days −6, 28. Serum was separated and stored in −30° C. IgG were determined in plasma by ELISA. Briefly, ELISA plates were coated with 5 μg/ml IGFBP-2 (39-328) in carbonate bicarbonate buffer, blocked with 2% BSA, serum (1:100 dilution in PBS-T) were evaluated by HRP-conjugated goat anti mouse IgG (1:6000). Average background (PBS only) was calculated, and samples which have OD450 value more than 2*average background are considered as positive. The dilutions of such samples are determined as the endpoint titers.

### REFERENCE RELIED UPON IN THIS EXAMPLE

[0342] 1. Melero, I. et al. Therapeutic vaccines for cancer: an overview of clinical trials. Nat Rev Gin Oncol 11, 509-524 (2014).
[0343] 2. Obeid, J., Hu, Y. & Slingluff, C. L., Jr. Vaccines, Adjuvants, and Dendritic Cell Activators—Current Status and Future Challenges. Semin Oncol 42, 549-561 (2015).
[0344] 3. Pol, J. et al. Trial Watch: Peptide-based anticancer vaccines. Oncoimmunology 4, e974411 (2015).
[0345] 4. Speiser, D. E. & Romero, P. Molecularly defined vaccines for cancer immunotherapy, and protective T cell immunity. Semin Immunol 22, 144-154 (2010).
[0346] 5. Thomas, A. & Giaccone, G. Why has active immunotherapy not worked in lung cancer? Ann Oncol 26, 2213-2220 (2015).
[0347] 6. Ebert, L. M. et al. A cancer vaccine induces expansion of NY-ESO-1-specific regulatory T cells in patients with advanced melanoma. PLoS One 7, e48424 (2012).
[0348] 7. Galon, J. et al. Type, density, and location of immune cells within human colorectal tumors predict clinical outcome. Science 313, 1960-1964 (2006).
[0349] 8. Fridman, W. H., Pages, F., Sautes-Fridman, C. & Galon, J. The immune contexture in human tumours: impact on clinical outcome. Nat Rev Cancer 12, 298-306 (2012).
[0350] 9. Kenter, G. G. et al. Vaccination against HPV-16 oncoproteins for vulvar intraepithelial neoplasia. N Engl J Med 361, 1838-1847 (2009).
[0351] 10. Madan, R. A., Bilusic, M., Heery, C., Schlom, J. & Gulley, J. L. Clinical evaluation of TRICOM vector therapeutic cancer vaccines. Semin Oncol 39, 296-304 (2012).
[0352] 11. Disis, M. L. et al. Concurrent trastuzumab and HER2/neu-specific vaccination in patients with metastatic breast cancer. J Clin Oncol 27, 4685-4692 (2009).
[0353] 12. Moore, L. M. et al. IGFBP2 is a candidate biomarker for Ink4a-Arf status and a therapeutic target for high-grade gliomas. Proc Natl Acad Sci USA 106, 16675-16679 (2009).
[0354] 13. Busund, L. T. et al. Significant expression of IGFBP2 in breast cancer compared with benign lesions. J Clin Pathol 58, 361-366 (2005).
[0355] 14. Hu, Q. et al. Is insulin-like growth factor binding protein 2 associated with metastasis in lung cancer? Clin Exp Metastasis 31, 535-541 (2014).
[0356] 15. Boulle, N., Logie, A., Gicquel, C., Perin, L. & Le Bouc, Y. Increased levels of insulin-like growth factor II (IGF-II) and IGF-binding protein-2 are associated with malignancy in sporadic adrenocortical tumors. J Clin Endocrinol Metab 83, 1713-1720 (1998).
[0357] 16. Miyake, H., Hara, I., Yamanaka, K., Muramaki, M. & Eto, H. Prognostic significance of insulin-like growth factor (IGF) binding protein-2 to IGF-binding protein-3 ratio in patients undergoing radical cystectomy for invasive transitional cell carcinoma of the bladder. BJU Int 95, 987-991 (2005).
[0358] 17. Shi, L. H., Zhu, X. Q., Zhao, G. H., Xia, Y. B. & Zhang, Y. S. Expression of insulin-like growth factor binding protein-2 in gastric carcinoma and its relationship with cell proliferation. World J Gastroenterol 12, 6285-6289 (2006).
[0359] 18. Lee, E. J. et al. Insulin-like growth factor binding protein 2 promotes ovarian cancer cell invasion. Mol Cancer 4, 7 (2005).
[0360] 19. Lukanova, A. et al. Risk of ovarian cancer in relation to prediagnostic levels of C-peptide, insulin-like growth factor binding proteins-1 and -2 (USA, Sweden, Italy). Cancer Causes Control 14, 285-292 (2003).
[0361] 20. Degraff, D. J., Aguiar, A. A. & Sikes, R. A. Disease evidence for IGFBP-2 as a key player in prostate cancer progression and development of osteosclerotic lesions. Am J Transl Res 1, 115-130 (2009).
[0362] 21. Shariat, S. F. et al. Association of preoperative plasma levels of insulin-like growth factor I and insulin-like growth factor binding proteins-2 and -3 with prostate cancer invasion, progression, and metastasis. J Clin Oncol 20, 833-841 (2002).

### Example 10

### LAMP Constructs Comprising CMV pp65 and gB

[0363] Glioblastoma multiforme (GBM) brain cancer is an aggressive human brain cancer with 5 year survival rates below 10% (Schuessler A et al. 2014). Current treatment includes surgical removal of the tumor and radiation, however successful treatment increases the median survival to only about 15 months. Several clinical trials are currently being evaluated for GBM, including immunotherapy. Interestingly, it was recently found that GBM tumors express CMV antigens including the antigen pp65. The role of CMV in GBM is unclear because CMV is not an oncogenic virus, however from a therapeutic perspective, the presence of CMV antigens provides a unique opportunity to exploit pre-existing antiviral immunity for immune-based GBM treatment. A recent report showed that autologous immunotherapy using DC transfected with LAMP-pp65 mRNA in a unique protocol significantly improved GBM patient' survival. Specifically, Dr. Duane A. Mitchell from University of Florida, has shown that autologous DCs generated ex vivo, pulsed with LAMP-pp65 mRNA and injected back into GBM patients significantly improved the survival of GBM patients. The protocol for pp65-transfected DC also required pre-conditioning of the injection site by injection of Tetanus/Diphtheria vaccine 24 h before DC injection (Mitchell D A et al, 2015).

[0364] Here, we compare pp65+ILC-1 LAMP construct with gB+ ILC-1 LAMP vaccine using PharmaJet and ID/EP.

[0365] Materials and Methods

[0366] Reagents. Plasmid constructs Control, pp65+ILC-1 LAMP construct, and gB+ ILC-1 LAMP were constructed as described herein. pp65 and gB peptides for ELISPOT were purchased from JPT (70% purity). RBC lysis buffer was purchased from TonboBio and filtered through 0.22 μm filter. ConA (Sigma) was used at 2.5 ug/ml. Antibodies for IFNγ ELISPOT were purchased from eBioscience or Biolegend. IL-10 ELISPTO reagents, SA-ALP and BCIP/NBT plus were purchased from MabTech. Ab Titers were evaluated using HRP anti-mouse antibodies from Southern Biotech. Lysate of cells infected by CMV was purchased from Virusys. The lysate was confirmed by the manufacturing company to be non-infective.

[0367] Immunization and Plasma Collection. Six to eight week old male BALB/C mice bred and maintained at animal facility in Immunomic Therapeutics, Inc. Mice were immunized with the vaccine by either ID (Pharmajet) or ID via electroporation on days 0, 7, and 14. Mice were sacrificed on Day 26.

[0368] ELISPOT. ELISPOT was carried out as described herein, with the exception of cell number: the cells were seeded at 2*10⁵ splenocytes per well. Spleens from sacrificed mice were flushed with medium, red blood cells were lysed and then the cells were counted using a cellometer. 2*10⁵ splenocytes were seeded per well of ELISPOT and incubated with medium (RPMI with HEPES+10% HI equal Fetal+NaP+ßME+P/S), duplicate of PP65 and gB peptides (1 μg/ml of each peptide) or ConA (2.5 ug/ml). Results are shown after averaging the duplicate and reducing the value from RPMI well for each mouse.

[0369] Antibody titers. Antibodies titers were evaluated using a lysate of cells infected by CMV. Total IgG and IgG2a were evaluated. The results were only calculated for total IgG and only the 1:100 OD result was compared.

[0370] Results. FIG. 24 shows that IFNγ was induced with both pp65 and gB peptides. Additionally, serum Ab were tested from the last bleed. When lysate from CMV-transfected cells was used, similar IgG titers are seen for both immunizations. Specifically, FIG. 25 shows that total IgG (left) and IgG2a (right) antibodies titer at in serum of immunized mice against CMV-transfected cell lysate. Statistical analysis was done in GraphPad prism, using Mann Whitney test. IgG2a CMV-lysate Ag—P=0.041

### Example 11

### LAMP Constructs Comprising PSMA

[0371] Prostate cancer is the most frequently diagnosed cancer in men, and the second most common cause of cancer death in men in the US¹. For localized disease, surgery and radiation continue to be curative treatments but have adverse effects such as urinary symptoms and sexual dysfunction that can negatively affect quality of life. For metastatic disease, chemotherapy as initial treatment now appears to extend survival compared with androgen deprivation therapy alone (ADT)². ADT is associated with a) decreased bone mineral density and an increased risk of osteoporotic fragility fractures, b) development of castration resistant prostate cancer (CRPC). Methods to harness the immune system to recognize and kill prostate cancer cells are being exploited. One such attempt has led to Sipuleucel-T, a FDA approved, autologous cellular immunotherapy that targets prostatic acid phosphatase (PAP) for the treatment of asymptomatic or minimally symptomatic metastatic CRPC (mCRPC)³. Additional immunotherapies for prostate cancer are under development including a number of vaccine candidates, as well as approaches using targeted monoclonal antibodies^{4, 5}.

[0372] Several tumor-associated antigens (TAAs) have been identified that represent promising targets for T cell- or antibody-based immunotherapy. The group of molecules preferentially expressed in normal and malignant prostate tissues comprises prostate-specific membrane antigen (PSMA), prostein, prostate-specific antigen (PSA), prostatic acid phosphatase (PAP), prostate stem cell antigen (PSCA), T cell receptor gamma alternate reading frame protein (TARP), transient receptor potential (trp)-p8 and six-transmembrane epithelial antigen of the prostate 1 (STEAP1).

[0373] Human Prostate Specific Membrane Antigen (PSMA), also known as folate hydrolase I (FOLH1), is a 750-amino acid type II membrane glycoprotein, which is primarily expressed in normal human prostate epithelium and is upregulated in prostate cancer, including metastatic disease. Mouse homolog of PSMA (Folh1) is not expressed in the mouse prostate, but primarily expressed in the brain and kidney. Mouse Folh1 encodes for a 752-amino acid protein, with 86% identity and 91% similarity to the human PSMA amino acid sequence⁶. PSMA is considered an important clinical biomarker of prostate because it is expressed many fold higher on prostate cells than cells of other tissues^{7, 8, 9}. A strong correlation between increased PSMA expression and prostate cancer progression has been indicated¹⁰. Elevated PSMA expression is also associated with other malignancy including kidney and bladder cancer¹¹. Elevated PSMA expression has been observed on tumor neovasculature, but not normal vasculature suggesting a role for PSMA in angiogenesis¹². PMSA being a membrane protein is an attractive target to develop antibodies against it for diagnostic and therapeutic purposes¹³. Several therapeutic anti-PSMA mAbs have been developed, and many of these have been used in radioimmunotherapy for targeting cytotoxic radionucleotides, specifically to PSMA expressing cells¹⁴. Some anti-PSMA mAbs have been demonstrated to mediate a therapeutic effect by promoting an antibody-dependent cellular cytotoxicity (ADCC) effect that kills prostate cancer cells^{4, 14, 15}

[0374] Materials and Methods

[0375] Mice. Six to eight week old female C57BL/6 albino mice were purchased from Envigo and maintained at animal facility in Immunomic Therapeutics, Inc. (Rockville, Mass.).

[0376] Reagents and antibodies. Control and PSMA-ILC-1 LAMP Constructs were made as described herein. Human PSMA PepMix (185 peptides, 15mers with 11aa overlap) was from JPT (Acton, Mass.). Mouse anti-human PSMA Alexa Flour 488, Goat (Fab)2 anti-mouse IgG-Fc PE were from abcam (Cambridge, Mass.), rabbit anti-human LAMP was from Sino Biological (Beijing, China). Goat anti-rabbit-HRP, goat anti-mouse IgG1-HRP and goat anti-mouse IgG2a-HRP were purchased from Southern Biotechnologies (Birmingham, Ala.). Streptavidin-HRP were purchased from Thermo Fisher (Waltham, Mass.). SureBlue TMB microwell peroxidase substrate and TMB stop solution were purchased from KPL (Gaithersburg, Md.). ELISPOT antibody pairs for IFNg was from BioLegend.

[0377] Vaccines, and immunizations. Control vector, PSMA-ILC-1 LAMP Construct was used in a total volume of 20 μl per mouse per dose. Mice were immunized with the vaccine by ID via electroporation on days 0, and 21. Serum was collected and stored in −30° C. Spleens were collected on day 34 for ELISPOT/ELISA assays.

[0378] Evaluation of antigen-specific T cell response. To assess antigen-specific T cell response in the vaccinated mice, splenocytes from vaccinated mice were evaluated for antigen-specific IFNγ and IL-10 by Enzyme-linked immunospot (ELISPOT). Splenocytes were depleted of RBCs and co-cultured in flat bottom 96-well plates in 200 μl/well T cell media (RPMI-1640 with L-Glutamine and HEPES (ATCC), 1% penicillin, 1% streptomycin, and 5×10−5M 2-ME) at 4×10⁵ cells/well and 10 μg/ml IGFBP2 (39-328) protein or concavalin A (0.25 μg/ml) or medium alone for 72 h at 37° C. in 5% CO₂. Plates were centrifuged at 1600 rpm for 6 minutes and supernatants were collected and stored at −30° C.

[0379] For ELISPOT assays were performed as described herein. Briefly, 96-well nitrocellulose plates (Millipore), were activated with 30 ul of 35% ethanol for one minute, washed with PBS twice, and coated overnight at 4° C. with 50 μl/well of capture monoclonal antibody in PBS. The plates were washed three times with 200 μl/well PBS and blocked with 200 μl/well T cell media for at least 2 hrs at room temperature. Splenocytes were plated at 3×10⁵ cells/well and co-cultured with 10, 5, 2, 1, 0.1, 0.01 μg/ml PSMA JPT peptide mix for PSMA or concavalin A (0.25 μg/ml) or medium alone in a total volume of 200 μl/well T cell media for 48 h at 37° C. in 5% CO₂. The plates were washed, diluted detection antibodies (50 μl/well) were added and plates were incubated for 2 hrs at room temperature on shaker. Plates were washed four times with PBS. Streptavidin-HRP diluted in PBS (50 μl/well) were added and incubated for 1 h. Plates were washed with PBS and developed with 50 μl/well AEC development solution for up to 30 min. Color development was stopped by washing under running tap water. After drying 24-72 h at room temperature in dark, colored spots were counted using an AID ELISPOT High-Resolution Reader System and AID ELISPOT Software version 3.5 (Autoimmun Diagnostika GmbH).

[0380] Measurement of serum PSMA-specific IgG/IgG2a and Prostein-specific IgG/IgG2a by ELISA. The murine antibody response to PSMA was assessed by indirect ELISA. ELISA plates (MaxiSorp) were coated with 5 ug/ml of PSMA protein in carbonate bicarbonate buffer overnight and then blocked with 2% BSA in PBS. Serum samples were diluted (1:100, 1:300, 1:900, 1:2700, 1:8100, 1:24300, 1:72900, 1:218700) in PBS-T. Samples were detected with 1:6000 goat anti-mouse IgG-HRP or 1:11000 goat anti mouse IgG2a-HRP (Southern Biotech, Birmingham, Ala.), followed by Streptavidin-HRP (Thermo Fisher Scientific, Rockford, Ill.). Reaction was developed with SureBlue TMB Substrate and stopped with TMB Stop Solution from KPL (Gaithersburg, Md.). Plates were read (OD450) by using Epoch ELISA reader (BioTek, Winooski, Vt.). Average background (PBS only) was calculated, and samples which have OD450 value more than 2*average background were considered as positive. The dilutions of such samples are determined as the endpoint titers.

[0381] Evaluation of intracellular cytokine. To determine the cells responsible for production of cytokines intracellular staining was performed. Splenocytes were depleted of RBCs stored in refrigerator for 24 h. Next day splenocytes were co-cultured in flat bottom 96-well plates in 200 ul/well T cell media (RPMI-1640 with L-Glutamine and HEPES (ATCC), 1% penicillin, 1% streptomycin, and 5×10−5M 2-ME) at 3×10⁶ cells/well and 2 ug/ml PSMA (JPT peptide mix) or medium alone. A mixture of Brafeldin A and monensin (×1000) was added to each well in 20 ul volume (0.22 ul per well for 20 ul volume; prepare a stock for all the wells) one hour later. PMA/ionomycin activation cocktail was added to positive control wells along with BFA and Monensin (Two wells were set-up; one for IgG control and other one for cytokine staining). Cells were incubated for total of 6 h at 37° C. in 5% CO₂.

[0382] Live/Dead staining (no protein in this step): Cells were washed with 200 μl PBS (no protein to this wash). Cells were stained with 50 ul of diluted Zombie aqua dye (1:500 dilution of zombie aqua in PBS) and incubated for 20 min at room temperature protected from light (no protein in this step). Cells were washed once with 2% serum in PBS.

[0383] Fc block: 20 ul of purified anti-mouse CD16/32mAb (clone 2.4G2; 1 ug/20 ul) was added to the cells and cells were incubated at 4° C. for 10 mins.

[0384] Surface staining: cells were centrifuged (2000 rpm, 6 min), supernatant was decanted, and extracellular antibodies were added in PBS supplemented with 2% serum. The antibodies were 0.3 ul of each/well. Abs were added in a volume of 50 μl/well, incubated for 30 min in 4° C. (the CD3 clone 17A2 can activate T cells so 4° C. temperature is important).

[0385] Fixation and permeabilization: Cells were washed with PBS+protein (2% FCS), fixed and permeabilized with 100 μl of CytoFix/CytoPerm solution at 4° C. for 30 mins (mixed thoroughly with the multichannel when adding the fix buffer to reduce aggregates and doublets formation). Cells were washed with 200 μl Perm/Wash buffer (1×) twice (2000 rpm, 6 min)

[0386] Intracellular staining: Cells were stained with the intracellular staining Ab at 0.5 μl Ab/well in Perm buffer. One of the PMA/ionomycin wells were stained with the isotype controls. After 1 h (or overnight) incubation cells were washed twice with perm buffer, and cells were acquired by flow cytometer. While acquisition the events/second were less than 8000. Acquired >10⁶ cells per sample.

[0387] The acquired data were analyzed using Kaluza analysis software. Dead cells and doublets were gated out.

[0388] Statistics. Statistical analyses were performed by using Prism 6 software (GraphPad Software, La Jolla, Calif.). Data were analyzed by one-way ANOVA followed by Tukey's test for multiple comparisons. p values below 0.05 were considered to indicate a statistically significant difference.

[0389] FIG. 26 shows that the PSMA-ILC-1 LAMP Construct induced significantly higher IFNγ producing effector T cells at the dose of 20 ug ID/EP immunization. Splenocytes (3×10⁵/well) were stimulated with PSMA peptide mix from JPT (2, 1, 0.1, 0.01, 0.001 ug/ml) in T cell media (RPMI with 10% heat inactivated FBS, 1% penicillin/streptomycin, and 1×2-ME), for 48 h. Values in dot plot are experimental—media for each mouse. N=7 mice per group. Dot plot to show recall with PSMA.

[0390] FIG. 27 shows that PSMA-ILC-1 LAMP Construct induced IFNγ producing CD4+ and CD8+ effector memory T cells at the dose of 20 ug ID/EP immunization. Splenocytes (3×10⁵/well) were stimulated with PSMA peptides (JPT; 2 ug/ml) in T cell media (RPMI with 10% heat inactivated FBS, 1% penicillin/streptomycin, and 1×2-ME) for 6 h. Cells were stained for intracellular cytokines as described and analyzed as shown below. Data from individual mice is shown.

[0391] FIG. 28 shows the total IgG and IgG2A production in C57BL/6 mice immunized with PSMA-ILC-1 LAMP Construct by immunization via ID/EP. IgG were determined in plasma by ELISA. Briefly, ELISA plates were coated with 5 μg/ml of PSMA in carbonate bicarbonate buffer, blocked with 2% BSA, serum (1:100 dilution in PBS-T) were evaluated by HRP-conjugated goat anti mouse IgG (1:6000).

[0392] Variations, modifications, and other implementations of what is described herein will occur to those of ordinary skill in the art without departing from the spirit and scope of the invention and the claims. All of the patents, patent applications, international applications, and references identified are expressly incorporated herein by reference in their entireties.

The application's sequence listing, which the Patent Office published only in electronic form, follows.

SEQUENCE LISTING (701 sequences)

SEQ ID NO: 1 - protein, 417 aa, Homo sapiens
MAAPGSARRPLLLLLLLLLLGLMHCASAAMFMVKNGNGTACIMANFSAAFSVNYDTKSGPKNMTFDLPSDATVVLNRSSCGKENTSDPSLVIAFGRGHTLTLNFTRNATRYSVQLMSFVYNLSDTHLFPNASSKEIKTVESITDIRADIDKKYRCVSGTQVHMNNVTVTLHDATIQAYLSNSSFSRGETRCEQDRPSPTTAPPAPPSPSPSPVPKSPSVDKYNVSGTNGTCLLASMGLQLNLTYERKDNTTVTRLLNINPNKTSASGSCGAHLVTLELHSEGTTVLLFQFGMNASSSRFFLQGIQLNTILPDARDPAFKAANGSLRALQATVGNSYKCNAEEHVRVTKAFSVNIFKVWVQAFKVEGGQFGSVEECLLDENSMLIPIAVGGALAGLVLIVLIAYLVGRKRSHAGYQTI

SEQ ID NO: 2 - protein, 410 aa, Homo sapiens
MVCFRLFPVPGSGLVLVCLVLGAVRSYALELNLTDSENATCLYAKWQMNFTVRYETTNKTYKTVTISDHGTVTYNGSICGDDQNGPKIAVQFGPGFSWIANFTKAASTYSIDSVSFSYNTGDNTTFPDAEDKGILTVDELLAIRIPLNDLFRCNSLSTLEKNDVVQHYWDVLVQAFVQNGTVSTNEFLCDKDKTSTVAPTIHTTVPSPTTTPTPKEKPEAGTYSVNNGNDTCLLATMGLQLNITQDKVASVININPNTTHSTGSCRSHTALLRLNSSTIKYLDFVFAVKNENRFYLKEVNISMYLVNGSVFSIANNNLSYWDAPLGSSYMCNKEQTVSVSGAFQINTFDLRVQPFNVTQGKYSTAQDCSADDDNFLVPIAVGAALAGVLILVLLAYFIGLKHHHAGYEQF

SEQ ID NO: 3 - protein, 416 aa, Homo sapiens
MPRQLSAAAALFASLAVILHDGSQMRAKAFPETRDYSQPTAAATVQDIKKPVQQPAKQAPHQTLAARFMDGHITFQTAATVKIPTTTPATTKNTATTSPITYTLVTTQATPNNSHTAPPVTEVTVGPSLAPYSLPPTITPPAHTTGTSSSTVSHTTGNTTQPSNQTTLPATLSIALHKSTTGQKPVQPTHAPGTTAAAHNTTRTAAPASTVPGPTLAPQPSSVKTGIYQVLNGSRLCIKAEMGIQLIVQDKESVFSPRRYFNIDPNATQASGNCGTRKSNLLLNFQGGFVNLTFTKDEESYYISEVGAYLTVSDPETIYQGIKHAVVMFQTAVGHSFKCVSEQSLQLSAHLQVKTTDVQLQAFDFEDDHFGNVDECSSDYTIVLPVIGAIVVGLCLMGMGVYKIRLRCQSSGYQRI

SEQ ID NO: 4 - protein, 478 aa, Homo sapiens
MGRCCFYTAGTLSLLLLVTSVTLLVARVFQKAVDQSIEKKIVLRNGTEAFDSWEKPPLPVYTQFYFFNVTNPEEILRGETPRVEEVGPYTYRELRNKANIQFGDNGTTISAVSNKAYVFERDQSVGDPKIDLIRTLNIPVLTVIEWSQVHFLREIIEAMLKAYQQKLFVTHTVDELLWGYKDEILSLIHVFRPDISPYFGLFYEKNGTNDGDYVFLTGEDSYLNFTKIVEWNGKTSLDWWITDKCNMINGTDGDSFHPLITKDEVLYVFPSDFCRSVYITFSDYESVQGLPAFRYKVPAEILANTSDNAGFCIPEGNCLGSGVLNVSICKNGAPIIMSFPHFYQADERFVSAIEGMHPNQEDHETFVDINPLTGIILKAAKRFQINIYVKKLDDFVETGDIRTMVFPVMYLNESVHIDKETASRLKSMINTTLIITNIPYIIMALGVFFGLVFTWLACKGQGSMDEGTADERAPLIRT

SEQ ID NO: 5 - protein, 197 aa, Homo sapiens
MSRLSRSLLWAATCLGVLCVLSADKNTTQHPNVTTLAPISNVTSAPVTSLPLVTTPAPETCEGRNSCVSCFNVSVVNTTCFWIECKDESYCSHNSTVSDCQVGNTTDFCSVSTATPVPTANSTAKPTVQPSPSTTSKTVTTSGTTNNTVTPTSQPVRKSTFDAASFIGGIVLVLGVQAVIFFLYKFCKSKERNYHTL

SEQ ID NO: 6 - protein, 406 aa, Mus musculus
MAAPGARRPLLLLLLAGLAHGASALFEVKNNGTTCIMASFSASFLTTYETANGSQIVNISLPASAEVLKNGSSCGKENVSDPSLTITFGRGYLLTLNFTKNTTRYSVQHMYFTYNLSDTEHFPNAISKEIYTMDSTTDIKADINKAYRCVSDIRVYMKNVTVVLRDATIQAYLSSGNFSKEETHCTQDGPSPTTGPPSPSPPLVPTNPTVSKYNVTGNNGTCLLASMALQLNITYLKKDNKTVTRAFNISPNDTSSGSCGINLVTLKVENKNRALELQFGMNASSSLFFLQGVRLNMTLPDALVPTFSISNHSLKALQATVGNSYKCNTEEHIFVSKMLSLNVFSVQVQAFKVDSDRFGSVEECVQDGNNMLIPIAVGGALAGLVLIVLIAYLIGRKRSHAGYQTI

SEQ ID NO: 7 - protein, 411 aa, Danio rerio
MARAAGVCWTLLMGCVFAAHAVTFEVTDGNSTCIKGELNASFSISYNTTNGTSVSVFALPASASVSERSSCGSAAVPPELALVFGDTHTHTLSLLFSRDQRLYRVSNISLQYNLSDGDIFPQSSSAGVQSVMASVSELMSARLNSTYRCVSSSSISLSAAVNLTLSGVQMEAYMSSANLSADESVCSADQPSTTVAPPPSTTTSPPPIPPVPERGNYSVTDGNGTVCVLALMGLQLNITHTTTQNQSVSELMNLQPNQTTVSGSCGVTESSLRLSDETTNLTFSFTMNSTTQKYYLSAVSVSALWPDMSVVFEAGNTSLSALQCSVGRSYVCSAQQMLSVTPVFSINTFRLQLQPFNITANRFSTAEECRVDQENMLIPIIVGAALAGLVLIVLVAYLIGRKRTHAGYQTI

SEQ ID NO: 8 - protein, 417 aa, Xenopus laevis
MSWRQVKMPVYWMAVMLLIGVVQVATAVQFEVKDGKTNITCILADLSINFSVSYNVSSKMELATFVLPSEAVTNINKSSCGVENTTAPVLAIQFGSNHSLSIHFARNNTRYEVAELVMSYNLSDKIIFPNASENGTKTVSTNKTAVLAENDTVYKCMNPHLIRMDNANATFHDIRLEAYLKQSNFSQKVSTCSEDITPTSAPAPVTTTAPVPAPVPDPPVVQYSVNRSSEPCLLAKVGLQMNITYTTKDGKNGSYVFNIESKGVTVDGNCTNTTAYLSLSTGSIDLRFNFTLNSSLEVFYLDGVSLSTGLPADANDTHFEAANSSLNYMQTNVHKSFKCNSKQTLQITDPFTVNTYHLQVQAFNSDNTFASAVECSLDENGMLVPIVVGAALAGLVLIVLIAYLIGRKRSHAGYQTI

SEQ ID NO: 9 - protein, 417 aa, Pan troglodytes
MAAPGSARRPLLLLLLLLLLGLVHCASAAMFMVKNGNGTACIMANFSASFSVNYDTKSGPKNMTFDLPSDATVVLNRSSCGKENTSDPSLVIAFGRGHTLTLNFTRNATRYSVQLMSFVYNLSDTHLFPNASSKEIKTVESITDIRADIDKKYRCVSGTQVHMNNVTVTLHDATIQAYLSNSSFSRGETRCEQDRPSPTTAPPAPPSPSPSPVPESPSVDKYNVSGTNGTCLLASMGLQLNLTYERKDNTTVTRLLNINPNKTSASGSCGAHLVTLELHSEGSTVLLFLFGMNASSSRFFLQGIQLNTTLPDARDPAFKAANGSLRALQATVGNSYKCNAEEHVRVTKAFSVNIFKVWVQAFKVEGGQFGSVEECVLDENNMLIPIAVGGALAGLVLIVLIAYLVGRKRSHAGYQTI

SEQ ID NO: 10 - protein, 415 aa, Macaca mulatta
MAAPGSARRSLLLLLLLLLGLTHCASAAMFIVKNGNGTACIMANFSAAFSVNYDTKSGPKNMTFDLPSDAKVVLNSSSCGKENTSDPSLVIAFGRGQTLTLNFTRNATRYSVQLMSFVYNLSDTHLFPNASSKEIKTVESITDIRADIDKKYRCVSGTQVHMNNVTVTLHDATIQAYLSNSSFSREETRCEQDRPSPTTAPPAPPSPSPSPVPESPSVDKYNVSGTNGTCLLASMGLQLNLTYERKDNTTVTRLLNINPNKTLASGSCGAHLVTLELHSEGSTVLLFQFGMNASSSRFFLQGIQLNTTLPDARDPAFKAANSSLRALQATVGNSYKCNAEEHVRVTKAFSVNIFKVWVQAFKVEGGQFGSVEECLLDENNMLIPIAVGGALAGLVLIVLIAYLVGRKRSHAGYQT

SEQ ID NO: 11 - protein, 413 aa, Canis lupus familiaris
MAAFGGARPRPLLLLLLAGLVHGAAAVFVVKDANGTACIMANFSAAFLASYETRSGPKNVTFDLPSDAVVLNSSSCGKENTSDPSLMIAFGKGHGLTLNFTRNATRYSVQLMSFIYNLSDTQIFPNASSKETKTVESATDIRADINKKYRCVSNTQIHMHNVTVTFHDVTIQAYLANSNFSKEETRCEQDGPFPTTAPPPPPHPSPSPAPESPSVHKYNVSGANGTCLLASMGLQLNVTYKKKDNTTVVKVVSINPNKTTAGGSCGAQLVTLELRSESVTLLAFQFGMNASTSRFFLQGIQLNMTLPDARDPTFKAGNNSLRALQATIGNSYKCNAGEHVQVTEAFSVNIIKVWVQAFQVQGDKFGSVEECQLDENSMLIPIAVGGALAGLVLIVLIAYLIGRKRSHAGYQTI

SEQ ID NO: 12 - protein, 417 aa, Oryctolagus cuniculus
MEAPGGARRPLLLLLLLGLVHGASAVFVVRNSNGTACIMANFSAVFSVIYESKSGYKNASFELPATAEVQNTSSCGRENTSNPSLQIAFGRGHVLALNFTRNATLYSVPLLSFVYNLSDSDLFPNASSKDIKTVGSTTDIKADIDKRYRCVSDSKVPMGNVTVTLQDATIQAYLWNNSFSQAESRCRQDMPSPTTAPPAPPVPPSPPSPSPPPKPESPSVSRYNVSDGNATCLLASMGLQLNLTYVHRDNATVTRVFNINPNKTKPSGHCGAQQVTLELQSERSTVLVFQFGMNASSGQYFLQGVLLNTTLPDAREPAFSASNSSLRALQATLGNSYKCNSEEHVRVTPAFSLSIFKVWVQAFQVKGDKFGSVEECLLDQDSMLIPIAVGGALAGLVLVVLIAYLIGRKRSHAGYQT

SEQ ID NO: 13 - protein, 409 aa, Bos taurus
MAAPGGARRRPLLLLLFAGLVHGASAVFVVKNGNGTACIMADFSATFLTSYDTRSGPQNKSFELPAGAEVSNSSSCGKENASDSSLVITFGRGHTLTLIFTRNATRYEVQLMRFAYNLSDTDTFPNSSSTGVKTVESATDIKADINKTYRCVSETQVNMDNVTVTLRDAAIQAYLSSSNFSREETRCEQDLPTPTTPPQPAPTPAPASPAVFRYNVSGSNGTCLLASMGLQLNVTYRRVDNKTVTREFNVNPNKTTFGGNCSATLATLELHSENLLLLALQFVMNESSSRVFLQGVQLNLTLPDAKEGSFTATNSSLRALQATAGNSYKCNAEQRLRVTSSFSLNMFRVWLQAFRVDGDKFGPVEECQLDENSMLIPIAVGGALAGLVLIVLLAYLIGRKRSHAGYQTI

SEQ ID NO: 14 - protein, 407 aa, Rattus norvegicus
MAAPGARRPLLLLLLAGLAHSAPALFEVKDNNGTACIMASFSASFLTTYDAGHVSKVSNMTLPASAEVLKNSSSCGEKNASEPTLAITFGEGYLLKLTFTKNTTRYSVQHMYFTYNLSDTQFFPNASSKGPDTVDSTTDIKADINKTYRCVSDIRVYMKNVTIVLWDATIQAYLPSSNFSKEETRCPQDQPSPTTGPPSPSPPLVPTNPSVSKYNVTGDNGTCLLASMALQLNITYMKKDNTTVTRAFNINPSDKYSGTCGAQLVTLKVGNKSRVLELQFGMNATSSLFFLQGVQLNMTLPDAIEPTFSTSNYSLKALQASVGNSYKCNSEEHIFVSKALALNVFSVQVQAFRVESDRFGSVEECVQDGNNMLIPIAVGGALAGLVLIVLIAYLIGRKRSHAGYQTI

SEQ ID NO: 15 - protein, 414 aa, Gallus gallus
MGGAARAVLLGFLQASSSFDVRDSTGKVCIIANLTVAFSVEYKSSGQKQFAHFFLPQNATSQSHSSCGEGNTSHPILALSFGAGHLISLNFSKTLDKYQVEELTFHYNLSDETLFPNATEGKVMVATQKSVIQARIGTEYRCINSKYVRMKHVNITFSNVTLEAYPTNDTFSANKTECREDMVSTTTVAPTTPKHATSQVPTTSPAPTAAPSSPAVGKYNVTGANGTCVLASMGLQLNITYVKKDEKMGLDLLNFIPHNTSASGMCESTSAFLNLAFEKTKITFHFVLNASSEKFFLQGVNVSTTLPSEAKAPTFEASNDSMSESRATVGNSYKCSAEENFQVTDKALVNVFNVQVQAFKVDGDKFGAMEECQLDENNMLIPIIVGAALAGLVLIVLIAYLIGRKRSHAGYQTI

SEQ ID NO: 16 - protein, 413 aa, Sus scrofa
MAAPGGAWRRPLLLLLLLLGLARGASAVFVVSDGNGTACIMADFAAAFEISYDSRSGAKNTTFSLPASAQVLNSSSCGKENTSDSSLVIAFGRGHTLTLSFTRNATRYSVQLMTLVYNLSDAEFFPSASSKGTKTVAASTDIRADLNTKYRCVSNSQVHLLNVTVTLGNATIQAYLANNSFSQQETRCEQDKPSPPTPTAPPTPTPTPAPTSPVVSRYNVSGANGTCLLASMGLQLNVTYRTKDNTTVTRGLNINPNKTTFGGSCSAQLVTLELQGESLRLLALQFALNTSSSRVFLQGVQLNMTLPDARDPSFSAANSSLRALQATAGNSYKCRSEQRLQVTEAFALNVFQVRVQAFRVDGDKFGPAEECQLDENSMLIPIAVGGALAGLVLVVLMAYLVGRKRSHAGYQTI

SEQ ID NO: 17 - protein, 422 aa, Monodelphis domestica
MAEPGGARTPQRLLLLLLGLIHVASSIFVVKNGTGTACIMANFSATFSMNYTTKSGLESTTFRLPQNASVMNSSSCGKENTSNPILEIGFGGGHTLTMNFSSTTQSYQVELLSFSYNLSDATLFPNASKGSEESSVKSKTDIQADIHKKYRCVSSNRITMSNVTIVLSDVTIQAYLSNNTFSKEETRCSQDTPSPSPVPTTHPTTIPVPTPTPTRPPTPAEIPPIFKYNVSDANGTCLLASMGLQLNITYAKKDNSSARIIWNINPNKTVAGGSCSPQVAILELQTENSTLAFSFGMNATTSKFFLREIRFHKFFPDAKDPAFGAVNSSLKELQATVGNSYKCNAEENVHVTDGFSVNIFRVRVQAFKVEGDKFGSVEECLLDENNMLIPIAVGGALAGLVLIVLIAYLIGRKRSHAGYQTI

SEQ ID NO: 18 - protein, 415 aa, Meleagris gallopavo
MARALLAAVLLGFLQASSSFDVRDSTGKVCIIANLTVAFSVEYKSNGQKQFAHFFLPQNATSQSHSSCGEGNTSHPILALSFGAGHLLSLNFSKTLDKYQVEELTFHYNLSDETLFPNASEGKVMEVTQKSVIQARIGTEYRCINSKYIYIRHVNITFSNVTLEAYPTNGTFSTNKTECSEDMVSTTTVAPTTPKHITSQVPATSPAPTAAPSNPAVGKYNVTGANGTCVLASMGLQLNITYLKKDGKTGLDLLNFVPHNTNASGTCENTSAFLNLAFEKTKITFHFVLNASSEKFFLQGVNVSTTLPSEAKAPMFEASNDSMSELRATVGNSYKCSAEENLQVTDKALVNVFNVQVQAFKVDGDKFGAVEECQLDENNMLIPIIVGAALAGLVLIVLIAYLIGRKRSHAGYQTI

SEQ ID NO: 19 - protein, 415 aa, Taeniopygia guttata
MARGLLAAAALLGFLQASSSFEVKDSSGKVCILADLTVAFSVEYKTNVQKEFVHFFLPQNASVDSQSSCGKDNASHPILVLDFGGGHSLSLNFSESADKYQVEELVFHYNLSDATLFPNSSTGGMKTVSHKSIIQAHMGTQYRCINSKHINMKNVNVTFSNVTLEAYLTNGTLSVNKTECAEDRVSTTTMVPTTPKQTTSQSPTTGPAPTSPPNPTVGKYNVTGPNGTCVLAYMGLQLNITYQQKDEKMGLDLLNFVPHNTTSSGRCDNTSALLNLTFEKTRVIFQFALNATAEKFFLQGVSVSTTLPSEAKNPKFEATNNSMSELRASVGNSYKCSSEENLQVTDQALVNVFNVQVQIFKIDGDKFGPVEECQLDENNMLIPIIVGAALAGLVLIVLIAYLIGRKRSHAGYQTI

SEQ ID NO: 20 - protein, 418 aa, Anolis carolinensis
MVSSSSCRRGLLLAAVLLGFLQASSTFEVRDKTGKICILANFSAEFTVDYSTKAKVERKTFQLPSSAHINKESSSCGKEKETSQVLVVEFGTGNSLTFTFEKSNDFYHVSNLTFSYNLSDSSFFPNSSGGQREVSRAGDIQANINTTYRCRSNHRVNMTNVTVLFSNVTLEAYLPNNAFSKNDSVCAEDKTSTVAPPITTHIPTTTSLAPPTPPPTDTPKIGRYNVTGLHGICLLATMGLQVNVTYSTKNKTSKSELLNLPPTAEVSGTCENSSITLNLTSESTSLSFQFSQNTSTEKYFLQGIIVTANLPPEATEKNISYSNHTLNALKTSVGKSYKCIAEESIWISGKAAVNIFNIQLQAFKIPGDKFGAVEECQLDENNMLIPIIVGAALAGLVLIVLIAYLIGRKRSHAGYQTI

SEQ ID NO: 21 - protein, 418 aa, Oryzias latipes
MKSFPSFVALFIVCSAVLADTQAVVTLEVKEGNSTCIKAEFSAVFSITYNTTNDTRTVSVFLPNSTTVDSANSSCGSNGSTPGLMAKFGPGHYFGMNFSTNGSLYSVDTLFLRYNLSDASLFPEANSSGPVDFELSASVGIWAPTNTTYRCLSPTTITITRPSVTFSEMKLEAYMPGNDFSPAERVCAADQTTTGAPTTTTSAATPTTPSPTPAGTPEQGSYSVKNASGTVCLMAKMGVQLNVSYFSQSQNKTVQELLNLTPNLTSSSGLCGGTNATLVLAQEETTVLSFLFTVNSTSNKYHLSGITLQANWTDMMSPFSASNTSLDYLRSSLGHSYMCNAEQTLFVVSTFSINMFELQVQPFGVTSTQFASAEVCQIDQDQMLIPIIVGAALAGLVLIVLIAYLIGRKRSHAGYQTI

SEQ ID NO: 22 - protein, 420 aa, Takifugu rubripes
MKRSHALVVLIIAWFSLSGCIQAVSLEVKEGNSTCIKANLSAYFSITYNTSSSTRTAQFILPDSATVDPDSSTCGGNGSSPWLVAVFGAGHALGLGFSTNGSFYSVANLTLQYNLSDASVFPDANSSGVVTVVSSSVGIWAAVNTTYRCLSSVLFQVGGATVTFSDMRLEAYMPGNDLSPRESFCAADQTTTAPPTTTAAPTTTAATTMAPPAPTPPGTPVRGTYSVVNGNDTTCLLAQMGLQLNVSYFSRSQNKTVQSLVNLTPNLTNSTGSCEKGSATLILTQQTTILIFTFSLNSTSSKYHLSGLSLQANWSDMAAAFSASNASLSYLRSTFGHSYMCNAEQILAVTPVFSLNTFSLQIQPFGVTTNQFAAAEECQMDQDQMLIPIIVGASLAGLVLIVLIAYLIGRKKSHAGYQTI

SEQ ID NO: 23 - protein, 419 aa, Salmo salar
MTRTCPFVVGIACFAILGCVTVVQSQVTLEVTEGNSTCIKAELSASFSITYDTANGTRTVMVPLPGSAVVGVASSCGGDGRSPWLVALFGDGHALGLGFSSNDSLYSVAKLTLQYNLSDVSNFPEANSTDVVTVETTSVGMVARVNTTYRCISASPVIVGGATVTFSNVTMEAFMTGEDLSPNESVCTADQSFTTAPPPPPSTTTAAPAPVPTPPGTPSQGSYSVSNSNGTVCLLARMALQLNISHFSASQNKTIQEVVNLLPNQTTSSGSCDPTSATLVLTQANATNLSFLFTLNSTSNRYHLTGLSVVAAWSDMTAPFNTSNSSLDYQRGSLGRSYMCISEQTLVVDQNFSLNTFQLQVQPFGITRGQFAQAEECQLDQDNMLIPIVVGAALAGLVLIVLIAYLIGRKRSHAGYQTI

SEQ ID NO: 24 - protein, 247 aa, Oreochromis niloticus
MVQICRVQSWFVGVTPLLIFATVLHQGFATVAPPTPAPHKEPGRPERGYYNVTNHNGTICLMAYMGLQLNISYNSTSQKKVVQDVMNLQPNLTKHSGLCDSDIASLNLTVDAVKTNLTFVFTMNSTSNKYHLSEVTVSAAWPEMKEPVSVHNSSLDYLRGTVGYSYFCRDEQTLNVAQNLSINTFQLQVQPFAVKGDQFGAAEECQLDEDDMLIPIVVGAALAGLVVIVLLAYLIGRKRSHAGYQSI

SEQ ID NO: 25 - protein, 415 aa, Mus musculus
MCLSPVKGAKLILIFLFLGAVQSNALIVNLTDSKGTCLYAEWEMNFTITYETTNQTNKTITIAVPDKATHDGSSCGDDRNSAKIMIQFGFAVSWAVNFTKEASHYSIHDIVLSYNTSDSTVFPGAVAKGVHTVKNPENFKVPLDVIFKCNSVLTYNLTPVVQKYWGIHLQAFVQNGTVSKNEQVCEEDQTPTTVAPIIHTTAPSTTTTLTPTSTPTPTPTPTPTVGNYSIRNGNTTCLLATMGLQLNITEEKVPFIFNINPATTNFTGSCQPQSAQLRLNNSQIKYLDFIFAVKNEKRFYLKEVNVYMYLANGSAFNISNKNLSFWDAPLGSSYMCNKEQVLSVSRAFQINTFNLKVQPFNVTKGQYSTAQECSLDDDTILIPIIVGAGLSGLIIVIVIAYLIGRRKTYAGYQTL

SEQ ID NO: 26 - protein, 415 aa, Xenopus laevis
MGDTGAMERCACPAAVLLLSLVLMGATAFEVEIKDDKNATCIYAKLSVNITVQYETDTSSSKNITFPVPSDVTTNGSSCGSDGKAPLLVINFGNSQSWSLNFTRNNSTYSGSALIFTYNTNDTILFPDALRKGLISSTAMFLGPVPLNSTYKCISREVVVSENVTQIIYDVKLEAFMANGTLGKEIICDADKPSPVPSPTQPSTTASTAIPAPTSKPLDKPTMGNYTVSDASGICLLASMGLQINTSLLSEGKNIWRPFNIDPLGIKTNGTCTNQTGTLILTENRTIIEFTFALKNKNHFYLEEVNITLINGSAFSSRQNQNLSTWEASVDSSYMCHKEQQIKVSEDLFINAFDVRVQPFGVNNGTFATAEDCFADQNFIVPIVVGAALGVLVVLVMVAYFIGRRKQSSAGYEQM

SEQ ID NO: 27 - protein, 355 aa, Danio rerio
MAVRGFLPLLFILLSGIVHADDMMTSPLPSTAELKTANLPLVIQTTSSTTSTTTTSRPSSTSTHSTLTTEPAAKTTTARTTVTTSAPTSTQSTSSSSTSATVTTLAPTTTGHNTTNSTTEPPTTTGHNTTNSTTDAPTTTHTNATVAPTPPPTTPSVPKPTVGNYSVKTDNVSDCLLAKMGLQFSFKISGNASLQTVNLDPNVTKVNGTCGSGGSDSSLFLTSKDITVHFVFTNDSQKFRLHALTLTVDLGNGNIFNDSNTNLSLWEASVGSSYMCRKEQSYNISDKLTLNTFELQVQPFDVKKNSFSTAHECSLDDTSLLIPIIVGAALAGLIFIVVIAYVIGRRRTYVGYQTL

SEQ ID NO: 28 - protein, 411 aa, Papio anubis
MVCFRLFPVPGSGLVLVCLVLGAVQSYALELNLTDSGKATCLYAKWQMNFTVRYETTNKTYKTVTISDRGTVTYNGSICGDDQNGPKIAVQFGPGFSWIANFSKAASTYSIDSISFSYNTGDNTTFPDAEDKGIITVDELLAIKIPLNDLFRCNSLSTLEKNDVVQNYWDVLVQAFVQNGTVSTNEFLCDEDKTSTVAPTIHTTVPSPTTTPTPKEKPEAGTYSVNNGNDTCLLATMGLQLNITQDKVASVININPNTTHSTGSCRSHTALLRLNSSTIKYLDFVFAVKNENRFYLKEVNVSMYLVNGSVFSIANNNLSYWDAPLGSSYMCNKEQTVSVSGAFQINTFDLRVQPFNVTQGKYSTAEECSADSDLNFLIPVAVGVALGFLIIVVFISYMIGRRKSRTGYQSV

SEQ ID NO: 29 - protein, 410 aa, Macaca mulatta
MVCFRLFPVPGSGLVLVCLVLGAVQSYALELNLTDSGKATCLYAKWQMNFTVRYETTNKTYKTVTISDRGTVTYNGSICGDDQNGPKIAVQFGPGFSWIANFSKAASTYSIDSISFSYNTGDNTTFPDAEDKGIITVDELLAIKIPLNDLFRCNSLSTLEKNDVVQNYWDVLVQAFVQNGTVSTNEFLCDEDKTSTVAPTIHTTVPSPTTTPTPKEKPEAGTYSVNNGNETCLLATMGLQLNITQDKVASVININPNTTHSTGSCRSHTALLRLNSSTIKYLDFVFAVKNENRFYLKEVNVSMYLVNGSVFSIANNNLSYWDAPLGSSYMCNKEQTVSVSGAFQINTFDLRVQPFNVTQGKYSTAQDCSADDDNFLVPIAVGAALAGVLILVLLAYFIGLKRHHAGYEQF

SEQ ID NO: 30 - protein, 364 aa, Pan troglodytes
  SITE (200)..(200): Xaa can be any naturally occurring amino acid
MVCFRLFPVPGSGLVLVCLVLGAVRSHALELNEADSAINCSKCKTVTISDHGTVTYNGSICGDDQNGPKIAVQFGPGFSWIANFTKAASTYSIDSISFSYNTGDNTTFPDAEDKGILTVDELLAIKIPLNDLFRCNSLSTLEKNDVVQHYWDVLVQAFVQNGTVSTNEFLCDKDKTSTVAPTVHTTVPSPTTTPTRIPPXVASVININPNTTHSTGSCRSHTALLRLNSSTIKYLDFVFAVKNENRFYLKEVNISMYLVNGSVFSIANNNLSYWDAPLGSSYMCNKEQTVSVSGAFQINTFDLRVQPFNVTQGKYSTAEECSADSDLNFLIPVAVGVALGFLIIVVFISYMIGRRKSRTGYQSV

SEQ ID NO: 31 - protein, 411 aa, Canis lupus familiaris
MVCFRLSPAPGSGLVLLCLVLGAVSSYALEVNVTDSEKATCLYAKWQMNFTIQYNTTSKNFKTATISDFSTATYNGSVCGNDQNNPKIVVQFGSGFSWIVNFTKKESAYLIDSISFSYNLSDNATFPDAKEKGILTVHDLVGFRIPLNNIFRCNSLSTLEKNGVVQYYWDVHVQAFVQNGTVSTKEFLCEKDKTSTTVVPTISTTTPSPTTTPTPKEKPEVGSYSVNNSNGTCLLATMGLQLNITHNKVASVININPNTTDFTGSCQPQTALLRLNSSNIKYLDFVFAVKNENRFYLKEVNVSMYLVNGSVFSIANNNLSYWDAPLGSSYMCNKEQTVSVSGAFQINTFDLRVQPFNVMEGKYSTAQECSLDDDTILIPIIVGAGLSGLIIVIVIAYLIGRRKSYAGYQTL

SEQ ID NO: 32 - protein, 417 aa, Equus caballus
MVCFRLSPVPGSGLVLLCLVLGAVSSYALELNLTDSEKALCLYAKWQMNFTIPYETTSKSYKTVTISNFGTPTYNGSICGDNQNGSRIAVQFGSGFSWIVNFTKSVSVYSIDSISFSYNTGDNTTFPDAKDKGILTVNESVAFKIPLNDIFRCNSLSSLVKNGVVQNYWDVHVQAFVQNGTVSTNEYLCEKDNTTTTVAPIVPTTVPSPTTTSSPTTTPSPKEKPDVGSYLVKNGSDTCLLATMGLQLNVTHDKVASVININPNVTGYSGSCHPQTALLRLNSSNIKYLDFVFAVKNENRFYLKEVNVSMYLANGSVFSFANNNLSYWDAPLGSSYMCNKEQTVSVSGEFQINTFDLRVQPFNVKDGKYSTAQDCRADDDNFLVPIAVGAALAGVLILVLLAYFIGLKRHHAGYEQF

SEQ ID NO: 33 - protein, 407 aa, Bos taurus
MVCFRLAPVPGSGFLLLCLVLGAVSSYALELNLTDSSNATCLYAKWQMNFTIRYETTDKHNKTVPISDLGAATYNGSFCGDDQNGPKIAVQFGSGFSWIVNFTKEAASPSTYLVDTISFSYNTNDNKTFPDAKEKEVFTVNNRVALKIPLNDIFRCNSLSTLENRDVVQHYWDVHVQAFVQNGTVSTTEFLCDKDKTVTTAVPIVPTTLPSPTKPVVGSYSVVNSNGTCLLATMGLQLNITHDKVASVFNINPNTTNATGSCQPQTALLRLSSSNIKYLDFVFAVKNENRFYLKEVNVSMILVNGSVYSISNTNLSYWDAPLGSSYMCNKEQTVSVSGAFQINTFDLRVQPFSVTEGKYSTAQECSLDDDTILIPIIVGAGLSGLIIVIVIAYLIGRRKSYAGYQTL

SEQ ID NO: 34 - protein, 411 aa, Sus scrofa
MVCFRLSPVPGSGLLMLCLVLGAVSSYALELNLTNSEKATCLYAKWQMNFTIRYETTNNSHKTVSISDFGAATYNGSFCGDDHNDPQIVMQFGSGFSWIVNFAKESSSYLINSISFSYNTSDTTTFPDAKKKGVLTVNDSVGFQVPLNDIFRCNSLSTLEKDNVVQHYWDVHVQAFVQNGTVSTKEFLCDKDKTLTTTVPVIPTSVPSPTTTPTPKEKPETGSYSVTSSNGTCLLANMGLQLNITQDKVASVININPNTTNATGNCHSKTALLRLSGSNIKYLDFVFAVKNDNRFYLKEVNVSVYLVNGSVFSIANNNLSYWDAPLGSSYMCNKEQTVSVSGAFQINTFNLRVQPFSVMEGKYSTAQDCSADDDNFIVPIAVGAALAGVLILVLLAYFIGLKRHHAGYEQF

SEQ ID NO: 35 - protein, 408 aa, Ovis aries
MVCFRLAPVPGCGFLLFCLVLGTVSSYALELNLTDSSKATCLYAKWQMNFTIRYETTDKHNKTVTISDFDAAAYNGSVCGDDQNGPKIAVQFGSGFSWIVNFTKEASSTSTYLVDSISFSYNTNDNATFPDAKEKGVFTVNNRVALKIPLNDIFRCNSLSTLEKSDVVQHYWDVHVQAFVQNGTVSTTEFLCDKDKTVTTAMPIVPTTAPSPTKPVVGSYSVVNSNGTCLLATMGLQLNITHDKVASVFNINPNTTNATGSCQPQTALLRLSSSNIKYLDFVFAVKNENRFYLKEVNVSMILVNGSVYSISNTNLSYWDAPLGSSYMCNKEQTVSVSGALQINTFDLRVQPFSVTEGKYSTAEECSADSDLNFLIPVAVGVALGFLIIVVFISYMIGRRKSRTGYQSV

SEQ ID NO: 36 - protein, 411 aa, Rattus norvegicus
MRLLSPVTGSKLVLLFLFLGAVRSDALKLNLTDSKGTCLYAEWEMNFTITYEALKVNETVTITVPDKVTYNGSSCGDDKNGAKIMIQYGSTLSWAVNFTKEASQYFINNITLSYNTNDTKTFPGAVPKGILTVIIPVGSQLPLGVIFKCSSVLTFNLSPVVQHYWGIHLQAFVQNGTVSKHEQVCKEDKTATTVAPIIHTTVPSPTTTLTPTSIPVPTPTVGNYTISNGNATCLLATMGLQLNITEEKVPFIFNINPATTNFTGSCQPQTAQLRLNNSQIKYLDFIFAVKNEKRFYLKEVNVNMYLANGSAFHVSNNNLSFWDAPLGSSYMCNKEQVVSVSRTFQINTFNLKVQPFNVTKGEYSTAQDCSADEDNFLVPIAVGAALGGVLILVLLAYFIGLKRHHTGYEQF

SEQ ID NO: 37 - protein, 570 aa, Ornithorhynchus anatinus
MAMKNFTLQQERDTSVALIIRTYVRAFLKVYTKVPKPQRCHNQWQSLNIEGIEGIEIVKGSKWRSALETIITIQVKRKSQVQKYHPFSLHSECQKTNQEGTGGVATVIADECLLWPSIPFSTLAQKVNLGSCEAFSIIGYSVFALFIYLKPNMLDFIELAELMLSTETQLLEPTRVCCGICQSYALEINLTDSKNATCLYSKWQMTFTINYETTGNETKNVTVTVPENVTYDGSSCGDNQTVPQIAVQFGLGYSWHLNFTKKENNSYSFDTIVFTYNTSDNETFPEAKEKGQVLSVFEFRYARIPLNKIFRCHSEESLIGDKATHHYWETVVQAFIQNGTISKEEFICSKDRASTTVAPVTTQVVPSTTATPVPQDKPYPGKYAVKNGNDTCLLATMGLQLNVTQNKVNSVININPNVTDFTGSCSNETAELRLSGSNVKYIDFIFAVKNGNRFYLKEVNVSISFVNASDLNVANNNLSYWDAPLGSSYMCNKEQTLALADSLQINTFNLRVQPFSVVAGKYSTAEDCSADDDNFIVPIAVGAALGGLVILVLMAYFVGRKRRATGYEQF

SEQ ID NO: 38 - protein, 425 aa, Gallus gallus
MAPPRCPAGLALLLLLLGACGFFQSYAVEVDVKDASNFTCLYAQWMMKFLIKYETNSSDYKNASLDLTSTVTHNGSICGSDTQAALLAVQFGDGHSWSINFTKNNETYRAEFITFTYNTNDTAVFPDARRQGPVTIVVKDAMHPIQLNNVFVCHHTTSLEAENVTQIFWNVTMQPFVQNGTISKKESRCYADTPTAAPTVLPTVANVTTASTTISPAPTTAPKPAENPVTGNYSLKTGNKTCLLATVGLQLNISQDKPLLINIDPKTTHADGTCGNTSATLKLNDGNRTLIDFTFIVNASASVQKFYLREVNVTLLNYQNGSVILSADNNNLSKWDASLGNSYMCRKEQTLEINENLQVHTFNLWVQPFLVKENKFSIAEECFADSDLNFLIPVAVGMALGFLIILVFISYIIGRRKSRTGYQSV

SEQ ID NO: 39 - protein, 556 aa, Taeniopygia guttata
MECREGEVTRCKQKNNLFSGINDDISGAKQAKQRQCTPQKPPKRATATLPLQRPPRGIPGPAPAAVAAAVAADRITPSGSHQTRPPEAARDERPVRDPRNRAAAPSGHWRRAGGPQRHRHHRHRRHGPAPLRRLLLRPPPPAAAAARFLGFFQSYAVEVDIKDASNATCLYADWMMRFLIKYESNSGDYKTTTLNLSSSVTHNGSVCGNDTQAALVAVQFGEGHSWSINITKNNETYQGDFITLTYNTNDTAVFPDAKRKGPITVLVRDPSRPIQLNTVFVCHNSFVIEAENTTQIFWNVTMQAFVQNGTVSKKESRCPADTPTSEPTVPPTIANVTTASTTTLSPAPTTAPKPVENPVTGNYSLKSGNKTCFLATVGLQLNVSQEKPLLININPKTTVADGACGNTTATLKLNDGNSTLIGFTFAVKNTSASVQKFYLREVNVTLLNRLNGSVISSADNSNLSKWDAFLGSSYMCRKEQTLQINENVQVHTFNLWIQPFLVEANKFATAEECIADSDLNFLIPIAVGVALGFLIILVFISYIIGRRKSRTGYQSV

SEQ ID NO: 40 - protein, 408 aa, Xenopus tropicalis
MERCACPAALLLLSLVLMGAMAFDVEIKDDKNATCIYAKLSVNVTVQYETNTSSTKNVTFSVPSEVTTNGSSCGSNGKAPILVINFGNGHSWSLNFTRNDSMYSGGALIFTYNTNDSTLFPDALKEGLISSTAAFLGPIPLNSTYKCISSEVVVSENVTQIISDVKLEAFMQNGTLGKEVSCDADKPSPTPTTNPSTTASTTTPTPTSKPLDNPTTGNYSVSDVNGTCLLASMGLQINTSLLSEGKNIWTAFNIDPTAMSKNGTCSNQTGTLILTDNSTVIEFTLALKNKNHFYLKEVNVALINGSASSTRQNQNLSAWEASVGSSYMCHKEQQIKVSEDLVINSFDVRVQLFGVKNETFATAQQCSLDDDSIVIPIVVGAALAGLIVIIVIAYLIGRRKGYSGYQTL

SEQ ID NO: 41 - protein, 404 aa, Salmo salar
MFRCAFLILFLALGNELHLSHGTEVSVNNTENKLCLYANLMVNFSVTYEVGVNKNETVIFVLPENVTTEGSTCDNTTSTLKLSFGHGHSWTVEFTKKNKTYQVDTIVFSYNLNDSSVFPNSTSKETKFVTVKSIITNVSVDTYYSCKSENVLTVESVIQTLYDVALQAFVINGSKSDTDTVCSADMTSTTVAPTTTVTSTAAPTSTPTLPTPTTGKYSIAPDVNSTACLMATFGLQIGYKQGDKEETINLVPNITEVGGACGANSSDLILTSDTITIMFTFSNDGKKFHLHALKVTVKPATGDPVIAVNNNMSIWAAAVGSSYMCNKEQTLNVTDTLTLYTFELRVQPFEVNKGEFATAHECSLDDTSILIPIIVGAALAGLILIVVIAYVIGRRKTYVGYQTL

SEQ ID NO: 42 - protein, 410 aa, Oreochromis niloticus
MKVSHATAGLVVWFVVLGCIDAVTLEVKESNTTCIKADLSASFSIIYNTTHAERTVQVLLPNSTTVDTANSTCGKDGSSPRLVAVFGSGYTLGLNFSTNGTLYQVSSLTLQYNLSDTSVFPNATISGVVTLVSASVGIEANVNTTYKCASPTVIDVATAKVNFTDMRLEAYMPGNELSPNETVCFADQTSTTPSPTTVSTTAVPTQTPPGTPQQGNYTVKDANDTICLLAKMGLQLNVSYTSQNKTVQDVLNLNPNVTNSTGSCGASSATLVLTQTQSTILTFNFTLNSTTNKYHLSGVTLIANWFDSAHFSMSNNSLNYLRSTLGYSYMCNAEQTLFVTPSFSLNTFDLQVQPFGVKSGRFATAEECQMDQNQMIIPIIVGAALAGLVLITLIAYLIGKRRSHAGYQAI

SEQ ID NO: 43 - protein, 249 aa, Takifugu rubripes
MTQIGGVQPVFLAVTVHLILATVLHQTFATVTPPVTTAVPHKEPGRPDQGDYQVTSSNGTVCFLASMGLQLNITFNSTSQNKTLQEVINIQPNRTKSSGSCDTSSALLTLTTDAEKTNLTFVFALNTTSNKYHLSEVSLSAALSDMKETFVAQNHSLDYLRGTLGFSYMCRERQTLGVTPDFAINTFQVQVQPFGVTGKQFAAAEECQLDKDDMLIPIIVGAALAALVLIVLSAYLIGRKRSHAGYQSI

SEQ ID NO: 44 - protein, 418 aa, Pan troglodytes
MPRQLSAAAALFASLAVILHDGSQMRAKAFPETRDYSQPSAAATVQDIKKPVQQPAKQAPHQTLAARFMDGHITFQTAATVKTPTTTPATTKNTATTSPITYTLVTTQATPNNSHTAPPVTEVTVGPSLVPYSLPPTITPPAHTTGTSSSTVSHTTGNTTQPSNQTTLPATLSIALHKSTTGQKPVQPTHAPGTTAAAHNTTRTAAPASTVPGPTLAPQPSSVKTGIYQVLNGSRLCIKAEMGIQLIVQDKESVSWGHRTITLSSKSLSGGCLARNEHSPHPLFLFFEKGPPSVTQAEDEESYYISEVGAYLTVSDPETIYQGIKHAVVMFQTAVGHSFKCVSEQSLQLSAHLQLKTTDVQLQAFDFEDDHFGNVDECSSDYTIVLPVIGAIVVGLCLMGMGVYKIRLRCQSSGYQRI

SEQ ID NO: 45 - protein, 416 aa, Papio anubis
MPRQLSAAAVLFASLAVILHDGSQMRAKAFPKTRDYSQPTAAATGQDIAKPVQQPANQAPHQTLAARLMDGHITFQTAATIKTPTTTPVTTKNTPTTSPIIYTLVTTQATSNNSHTAPPLTKVTVGPSLAPYSLPPTITPPAHTTGTSSSTVNHTTGNATQPSNQTTLPATLSIALHKSTTGQKPVQPTHAPGTTAAAHNTTRTAAPASTVPGSTLAPQPSSVKTGIYQVLNGSRLCIKAEMGIQLIVQDKESVFSPRRYFNLDPNATQASGNCGTRNSNLLLNFQGGFVNLTFTKDEGSYYISEVGACLTVSDPETIYQGMKHAVVMFQTAVGHSFKCVSEQSLQLSAHLQLKTTNVQLQAFDFEDDHFGNVDECSSDYTIVLPVIGAIVVGLCLVGIGVYKIRLRCQSSGYQRI

SEQ ID NO: 46 - protein, 416 aa, Macaca mulatta
MPRQLSAAAVLFASLAVILHDGSQMRAKAFPKTRDYSQPTAAATGQDIAKPVQQPANQAPHQTLAARLMDGHITFQTAATIKTPTTTPVTTKNTPTTSPIIYTLVTTQATSNNSHTAPPLTKVTVGPSLAPYSLPPTITPPAHTTGTSSSTVNHTTGNATQPSNQTTLPATLSIAPHKSTTGQKPVQPTHAPGTTAAAHNTTRTAAPASTVPGSTLAPQPSSIKTGIYQVLNGSRLCIKAEMGIQLIVQDKESVFSPRRYFNLDPNATQASGNCGTRNSNLLLNFQGGFVNLTFTKDEGSYYISEVGACLTVSDPETIYQGMKHAVVMFQTVVGHSFKCVSEQSLQLSAHLQLKTTNVQLQAFDFEDDHFGNVDECSSDYTIVLPVIGAIVVGLCLVGMGVYKIRLRCQSSGYQRI

SEQ ID NO: 47 - protein, 428 aa, Canis lupus familiaris
MSWQLSAAVALFVSLALILHYGSQIRAKMFPETVDFQPTTAATVRATAKPFLHLTNQVPSQTLAARSMDGHIASQRAATTSSSEPPTTHTTVKTLVTTSLVTANSTPSSSPIIYTLVTTIVTPNNSNTAAPVTEATIGPSADPGSLPTTSTPLAHTTRTNPSTLSHKTRKTTHFGNQTTLPATLSTSTHKSTSSHKSAQSTHAPGPTTAAHNTTQTASPATPASGPTLAPQPSSPKTGIYQVLNGSRLCIKAEMGIELMVQDTKSVFSPQRYFNIDPNATQTSGNCGSQKSNLLLNFQGGFVNLTFLKDENSYYINEVGAYLAVSNPEKIYQGMKSSVVMFETGVGHSFKCVSEQSIQLSTHLQLKTMNVQFQAFDFEDDHFGNVDECSSDYTVVLPVIGAIVLGLCAVGLIVYGIHLRRESSGYQRI

SEQ ID NO: 48 - protein, 430 aa, Sus scrofa
MSWRLSAVLVSFVSLAVFLHYGHHMKAKVFPEITDSSSPTTAATVQATAEPSLWKPTNHTPHKTLAAKSTDGHVTSQIATTVTDSETLTTHTTITTLAATSLAATNSTPSTSPTTHTLFTTLATPNTSHMAAPVTEAAISPSAGLSSLLPTIIPPAHTTGTRSSTLSPTAGKTTQPSNQTTLPATLSTSPHNSTASQKPTHPNHTPGPTTGAHNTTQTASPATIAPGPTLAPQPSSAKTGIYQVLNGSKLCIKAEMGIELTVQDTQSVFSPQRYFNIDPNTTQASGNCGSRKSKLLLNFQGGFVNLTFTKDENSYYVSGVGAYLTVSNPEKVYQGMKNAVVMFETMIGHSFKCVSEQSIQLSPHLQLNTMNVQLQAFDFEDDHFGNVDECSSDYTIVLPVIGAIVLGLCAVGLIVYGIRLKRESSEYQRI

SEQ ID NO: 49 - protein, 259 aa, Danio rerio
MTQSSRSVLLLMLSSLHCLGSSLESNPKDPSVLAEAPGQNKRDSDISLVPQMPVLQPKETAPPLVTYTIRNPQGKVCVRASFGVEFVVRENKKKYYFNLTPNSARATGYCANQKTVLSLEFSGGNLEFTFIKDGDQSYVKTVKGSLRAAPPCKNCPSKIYVGLVDNEKLFKAKNGLSFNCKSETMLILADYFRLKLVPLQIQAFDLVNGAFGKEVECWADYNKRMIPIILGAVAAAICLIAILTYVLVREHRNQGYEQL

SEQ ID NO: 50 - protein, 432 aa, Equus caballus
MAWQLSAVVVLFVSLAVILYYGSHVRANVFPEITDYSQPTTAATIQTRAQPSLSQPTNQVPHKTLATRSMDGQVTSQTAATTVNPETPVTHTTIKTAAATSLVTTNSTLSTSPITNTLLTTLATPDNTHTTTPVTEATIGPSAGPGSPPTTITTTSSAYTTGTRSSTVSHTTGKTTQLSNQTTLPATLSTSPHNSTTSQNPAHSTHTPGPTTGTCNTTQTASPTTTAPGPTLAPQPSSAKTGMYQILNGSKLCIKAEMGIQLTVQDTKSASPPQGYFNIDPNTTQVSGICGSRKSNLLLNFWGGFVNLTFTKDENSYYISEVGAYLTVSNPEKTYQGMKSPVVMFETVIGHSFKCVSEQSLELSTQLHLKTTNVQLQAFDFEDDNFGNVDECSSDYTVVLPVIGAIVLGLFAVGLIVYGVRVRREASGYQRI

SEQ ID NO: 51 - protein, 433 aa, Bos taurus
MSWQIPAVVMSFMALVAIWYYDSHYNSHMQAKVFPEITGYSSPTTGQATVKPSLLQPTNYVPHKTAAARSTDGHVTSQTVAKTSSSETLTTNTTIDVLATTSPVTTKSTLPTTPTTHTLVTTLATPNKSHVTFPVTEAKVGLSVGPSSPPVTVNPTAHTTGNRPSTASHTTGKTTQLSNQTTLPATLSTSPHNITTSQKPTQPTHTPGPTTATYNTTQTASPATIAPRPTLAPQPLSPKTGIYQVHNGSKLCIKAEMGIQLTVQDSVSVFSPQKYFNIDPNATQASGNCGSRKSNLLLNFQGGFVNLTFTKGEKSYYISEVEAYLTVSNPAKVYQGLKHAMMMFETVVGHSFKCVSEQSIQLSTYLQLKTMNVQLQAFDFEDDHFGNADECISDRNRREIPVAVGLSIAVLLAVLLTACLVTRKRPSRGYERM

SEQ ID NO: 52 - protein, 429 aa, Ovis aries
MSWQISAVVLFFVSLAVIWYYDSHMKANVFPEITGYSSPTTGQATVKPSLLQPTNHVPCNTAAAKSTDGHVTSQTVAKTSSPETLTTNTTIEVLVTTSPVTTQSTLPTTPTTHTLVTTLATPSKSHVTFPVTEAKAGLSIGPSSPPVTINPAAHTTGNRPSTASHTTGKTTQLSNQTTLPATLSTSPHNITTSQKPTQPTHTPGPTTAANNTTHTASPATIAPRPTLAPQPLSPKTGLYQVLNGSKLCIKAEMGIQLTVQDSVSVFSPQKYFNIDPNATQASGNCGSRKSNLLLNFQGGFVNLTFIKDENSYYISEVEAYLTVSNPAKVYQGMKYAMMMFETVVGHSFKCVSEQSIQLSNHLQLKTVNVQLQAFDFEDDRFGNADECISDRNRREIPVAVGLSIAVLLAVLLTACLVTRKRPSRGYERM

SEQ ID NO: 53 - protein, 408 aa, Rattus norvegicus
MPGQTSAVAVLLCLAVILHGYQIREKEFPEARGYLQYTATTTEQITAKPPLPLTNQTSHATLASRSKDDYIQTAAETSTFEDTAHITMKTAIPVTTKSLLPISSTSYTFVRTNNSHMTASSTEDTIGSGSITHLPFPTTRASLAAVNHITGRSTQLGGQTTLPKALFTPSHESTTTQRPTLSTIVSELTPTGKDRSTTSSVPLVPRPTFVTWSSPAKIGTYEVLNGSRLCIKAEMGIALIVQEKGLDSATQRHFNIDPSLTHASGKCGSQNSNLFLNFQGGSVNVTFTKEENLYYVSEVGAYLTISNTEKTYQGKSTMMMFETVVGHSFKCVSEQSIQLSAQLQMKTMNIHLQAFDFEGDSFGIVDECLSDYTVVLPVVGIIVVVLCVVGLGIYKIRQRRQSSAYQRI

SEQ ID NO: 54 - protein, 411 aa, Mus musculus
MPGQISAVAVLFLSLTVILHGYQIREKEFPKARGYLQYTATSAEQITTKPLLQLINQRSHITLASRFKDDYIQMAAETSAIENTAHITMKTVTPVTTKSLPPISSASYTFVRSNNAHMTASSTDDTIGSGSIAHLPVPTTRASLAIVNYITGRATQLGGQTTLPKTFFTASHKSTTNQRPTLSTNVLGTSTPTHKDRSTTSPVPLVPRPTLVTWSSPAKIGTYEVLNGSRLCIKAEMGLALIVQEKDLDSATQRYFNIDPSLTHASGKCDSQKSNLFLNFQGGSVNITFTKEENLYYISEVGAYLTISNTEKTYQGKKNTLMMFETVVGHSFKCVSEQSIQLSAQLQMKTMNIHLQAFDFEGDSFGNVNECLSDYTVVLPMVAIIVVVICVVGLSVYKIRQRHQSSAYQRI

SEQ ID NO: 55 - protein, 314 aa, Xenopus tropicalis
MDRVSLLSTILLLYGLLYINDAYSENTFAQPSNTTTPAPNTTTTHVTSNTTTLAPNTTTTHVTSNTTTLAPNTTTTHITSNTTTLAPNTTTTLAPNTTTTHSVTTTKTASTTTPTPTLEPKPSPPETGNYTVKIKNEFCIEALMGLELELTNSTKTQQYFNIVPSQINSNGTCEKSKANLNLTFANSYINFVFAQDDNSYYLDNVTVYFNLTRSESWYGNATNQKLLKTENGYSVKCKNTPKIQLGDTMNLVMTNVKLQVFNFKDNSFGKETTCKYDHNFGLMIAGIVIVVIVVLGVIIYFIWHKRKSSGYQRI

SEQ ID NO: 56 - protein, 478 aa, Pan troglodytes
MGRCCFYTAGTLSLLLLVTSVTLLVARVFQKAVDQSIEKKIVLRNGTEAFDSWEKPPLPVYTQFYFFNVTNPEEILRGETPRVEEVGPYTYRELRNKANIQFGDNGTTISAVSNKAYVFERDQSVGDPKIDLIRTLNIPVLTVIEWSQVRFLREIIEAMLKAYQQKLFVTHTVDELLWGYKDEILSLIHVFRPDISPYFGLFYEKNGTNDGDYVFLTGEDSYLNFTKIVEWNGKTSLDWWITDKCNMINGTDGDSFHPLITKDEVLYVFPSDFCRSVYITFSDYESVQGLPAFRYKVPAEILANTSDNAGFCIPEGNCLGSGVLNVSICKNGAPIIMSFPHFYQADERFVSAIEGMHPNKEDHETFVDINPLTGIILKAAKRFQINIYVKKLDDFVETGDIRTMVFPVMYLNESVHIDKETASRLKSMINTTLIITNIPYIIMALGVFFGLVFTWLACKGQGSMDEGTADERAPLIRT

SEQ ID NO: 57 - protein, 478 aa, Macaca mulatta
MGRCCFYTAGTLSLLLLVTSVTLLVARVFQKAVDQSIEKKIVLRNGTEAFDSWEKPPLPVYTQFYFFNVTNPEEILRGETPRVEEVGPYTYRELRNKANVQFGDNGTTISAVSNKAYVFERDQSVGDPKIDLIRTLNIPVLTVIEWSQVHFLREIIEAMLKAYQQKLFVTHTVDELLWGYKDEILSLIHVFRPDISPYFGLFYEKNGTNDGDYVFLTGEDNYLNFTKIVEWNGKTSLDWWITDKCNMINGTDGDSFHPLITKDEVLYVFPSDFCRSVYITFSDYESVQGLPAFRYKVPAEILANTSDNAGFCIPEGNCLGSGVLNVSICKNGAPIIMSFPHFYQADERFVSAIEGMHPNKEDHETFVDINPLTGIILKAAKRFQINIYVKKLDDFVETGDIRTMVFPVMYLNESVLIDKETASRLKSVINTTLIITNIPYIIMALGVFFGFVFTWLACKGQGSMDEGTADERAPLIRT

SEQ ID NO: 58 - protein, 478 aa, Canis lupus familiaris
MGRCCFYTVGTLSLLLLVTSIALLVARVFQKAVDQTIEKNIVLRNGSETFDSWKKPPLPVYAQFYFFNVTNPEEILRGEIPRLEEVGPYTYRELRDKADIQFGDNGTTISAVSNKAYVFERNQSVGDPKTDLIRTLNIPAVTAMEWAHLHFFRELIEALLKAYQQTLFVTHTVDELLWGYKDEILSLINVFKPEISPYFGLYYGKNGTNDGDYVFLTGEDNYLNFSKIVEWNGKTSLDWWTTDKCNMINGTDGDSFHPLIDKDEILYVFPSEFCRSVYITFSDFKSVQGLPAFRYKVPGEVLANTSDNAGFCVPKGNCLGSGVLNISICKNGAPIIISFPHFYEADKKFVSAIDGMRPNKDYHETFVDINPLTGIILRAAKRFQINVYVKKLDDFIETGNIRTMVFPVMYINESVLIDKDTASRLKSVINTTLIITNIPYIVMALGVFFGLIFTWLACRGQGSMDEGTPDERAPLIRT

SEQ ID NO: 59 - protein, 478 aa, Bos taurus
MGRCCFYAVGTLSLLLLVTSITLLVARVFQKAVDQTIEKNIVLRNGSETFDSWKKPPLPVYTQFYFFNVTNPEEILNGETPRLEEVGPYTYRELRNKDDIQFGDNGTTISAVSNKAYVFERDKSVGDPKIDLLRTLNIPALTAMEWTQLPLLRDIIEALLKAYRQKLFVTHTVDELLWGYKDEILSLINTFKHDVSPYFGLFYGKNGTNDGDYVFLTGEDNYLNFSKIVEWNGKTSLDWWTADECNMINGTDGDTFHPLITRDEVLYVFPSDFCRSVYITFSDFESVQGLPALRYKVPAEILANTSDNAGFCIPKGNCLGSGVLNVSVCKNGAPIIMSFPHFYQADEKFVSAIGGMHPNKEYHETFVDINPLTGIILRAAKRFQINVYVRKLDDFVETGNIQTLVFPVMYINESVLIDKETASRLKSVINTTLIVTNIPYIIMALGVFFGLIFTWLACRGQGSTDEGTADERAPLIRT

SEQ ID NO: 60 - protein, 478 aa, Mus musculus
MGRCCFYTAGTLSLLLLVTSVTLLVARVFQKAVDQTIEKNMVLQNGTKVFNSWEKPPLPVYIQFYFFNVTNPEEILQGEIPLLEEVGPYTYRELRNKANIQFGENGTTISAVTNKAYVFERNQSVGDPNVDLIRTINIPLLTVVDLAQLTLLRELIEAMLKAYQQKLFVIHTVHELLWGYKDEILSLVHIFKPDVSPNFGLFYERNGTNDGEYVFLTGEDNYLNFSKIVEWNGKTSLDWWTTDTCNMINGTDGDSFHPLISKDEVLYLFPSDLCRSVHITFSSFENVEGLPAFRYKVPAEILANTSENAGFCIPEGNCMDSGVLNISICKNGAPIIMSFPHFYQADEKFVSAIKGMHPNKEEHESFVDINPLTGIILRGAKRFQINTYVRKLDDFVETGDIRTMVFPVMYLNESVLIDKETANQLKSVINTTLVVTNIPYIIMALGVFFGLVFTWLACRGQGSMDEGTADERAPLIRT

SEQ ID NO: 61 - protein, 531 aa, Danio rerio
MTRRSCTIYATGIVCAHLLILGIALLLAQVFQTMIQERIKKEITLAENSRVLDGWINPPPPVYMQYFFFNVTNPDEFLAGKEKAKVTQMGPYTYREYRPRENVTYLENGTKIFATNPKSFVFLRNMSAGDPEVDRVTTVNIPMIAVMNELNSYSFFVRTAVSMYMGSMGMGLFMNRTVHEILWGFKDPLLTKLHAMRPEVDEHFGLMYNKNGTHEGEFVFHTGEKNYMNYGKIDTWNGISQMNWWSSNQSNMINGTDGSVFHTFLSRKELLYIFAADLCRSIHLGYVRDMEVKGIPAFRFAPPSDVLAPPDENPANAGFCVPAGDCLGKGVLKVSVCRQGAPIVVSFPHFYQADERYINAIEGMNPNEEEHETYLDINPTTGVPIRACKRAQLNIILKRVRGFPNTKFLNETIFPIMYVNETATIDDESAAQMRMLLLIVTVVSNFPVIILALGVILLVVLIFLVCRNRQRKNEVKRIDFTEAFHSFATTKDETAYTQVSNQAEDSPENRNNQPLRNGSYIAMSPVEAQKC

SEQ ID NO: 62 - protein, 478 aa, Rattus norvegicus
MARCCFYTAGTLSLLLLVTSVTLLVARVFQKAVDQTIEKNMVLQNGTKVFDSWEKPPLPVYIQFYFFNVTNPEEILQGEIPLLEEVGPYTYRELRNKANVQFGENGTTISAVTNKAYIFERNQSVGDPTVDLIRTINIPLLTVVEMAQQPFLREIIEAMLKAYQQTLFVTHTVHELLWGYKDEVLSLVHIFRPDVSPNFGLFYERNGTNDGEYVFLTGEDNYLNFTKIVEWNGKTSLDWWTTDTCNMINGTDGDSFHPLISKDETLYIFPSDFCRSVYITFSSFENVEGLPAFRYKVPAEILANSSENAGFCIPEGNCMDAGVLNVSICKNGAPIIMSFPHFYQADEKFVSAIKGMRPNKEEHESFVDINPLTGIILRGAKRFQINTYVKKLDDFVETGNIRTMVFPVMYLNESVLIDKETASQLKSVINTTLIVTNIPYIIMALGVFFGLIFTWLACRGQGSTDEGTADERAPLIRT

SEQ ID NO: 63 - protein, 481 aa, Gallus gallus
MRSLCLVTVGVLALTLLIASISLLVAHVFQTVVDLQVKQGTVLKNGTETFEAWEDPPPPVYMQFYFFNVTNPLEVLQGATPLVEEKGPYTYREYRPRVHVQFLDNGTKVSALNPKTYVFEPEKSVGNPEVDLIRTINVPAVTAMEWTRATSLQFATEVLLLLYQESLFTVRTVHELLWGYKDKLLSTIHVLHPEIDPVFGFFNKMNGTDDGEYVFLSGEMNYLNFSRIVEWKGKESLNWWTTKTCNMINGTDGTSFHPLISKDENIYIFSSDFCRSLYLVYDSSGSVAGVPTYRFVPSPMVFANTTVNPDNAGFCVPPGNCPGAGVLNVSICKQGAPIFLSAPHFYQADQKFVSDIEGMHPTKEYHETFVDINPLTGLVLQAAKRMQINIHVRKLPEFFETGNIRTLIFPVMYINESVLIDEASANKLKHVLLEASVVTGIPFVIMAIGIVFGIVFSVLVCRAQGAREESTEEERSPLIRT

SEQ ID NO: 64 - protein, 483 aa, Xenopus tropicalis
MVKWAVFGTAAVSVTLLIVSIVLLLTHTFMDIVEGQVKQAIVLKNESEVFEDWANPPPPVYMQFYFFNVTNPLEVLSGEKPFVDEIGPYTYREYRPRENITFSVNGTEVSAVTPKTYVFEPEKSIGDPKVDLIRTVNIPLVTILEMTKDSSLLRPFIIAALKTYKEGMFVTRTVDELLWGYKDAVLSILHPFKKNISDTFGLFYKMNTTDDGEYIFLSGEKDYLEFTQIAEWKGQKALNWWTTETCNMINGTDGTSFHPLLNKDDTIYMFSSDLCRSIYAVYESSENIKDISVFRFSPPASVFANVSVNPQNKGFCVPEGNCLPSGLLNVSICKEGAPIVLSSPHFYQADENVINSIRGMKPVKEHHMTFLDLNPLTGTLIQAAKRIQVNVYVRKINVYLITQDIQTLFFPVMHLNESVLIDDKSAGRLRSILFQGRVVANIPFIIMGLGIILAFLFTTLSCLQKRSRDEGTEEERGPLIRAS

SEQ ID NO: 65 - protein, 551 aa, Drosophila melanogaster
MQLDDILHINNCKADCSSLSTTPNPKTDLVNMNGPKHKFCTKLSSTYLRKWWITIVVAAALIIGGIVVACEFTVLIDAVVDRMVALRPGAKTFGWWAKPPVEPRISLYIYNVTNADDFLSNGSKAIVDEVGPYVYSETWEKVNIVENDNGTLSYNLRKIYSFREDLSVGPEDDVVIVPNIPMLSATSQSKHAARFLRLAMASIMDILKIKPFVQVSVGQLLWGYEDPLLKLAKDVVPKEQKLPYEEFGLLYGKNGTSSDRVTVNTGVDDIRRYGIIDNFNGRTHLPHWTTDACNTLAGTDGSIFPPHIDHDRILHVYDKDLCRLLPLVFEKEVMTSNEVPGYRFTPPEWVFADVDSHPDNMCFCPAGKPSCSPNGLFNVSLCQYDSPIMLSFPHFYLADESLRTQVEGISPPMKEKHQFFFDVQPKMGTTLRVRARIQINLAVSQVFDIKQVANFPDIIFPILWFEEGIDNLPDEVTDLMRFAEQVPPKIRVALIVGLCALGVILLLLSTFCLIRNSHRQSTLHLEGSNYLATAQVDMNKKQNKDNQPARY

SEQ ID NO: 66 - protein, 522 aa, Anopheles gambiae str. PEST
MYGRSNRLCAKLSSAFLRKWWFVIAFALSLLVLGALVTFGFTAFIRTIIDHQVALRVGGQSFGWWSRPPVEPIIRIFVYNVTNADEFLNNGTKPILDELGPYVYVQTWEKVNIKENPNGTISYNQKRVYIFNEDLSGGLEDDVVIVPNIPMLSATSQSKHAARFLRLAMASIMDILKIKPFVEVSVGQLLWGYEDPLLKLAKDVVPKEQKLPYEEFGLMYGKNSTSKDTVTVWTGVDDITQYGIIDKYNGRSHQTHWLSEQCNRLNGTDGSIFPPRITKNSTLHVYEKDLCRLLPLSFEKEVTVRGGVKGYRFTPSPDVFASVDKNPNNMCYCPAGPPCAPHGLFNVSLCQYDSPILLSFPHFYMADQTLRTAVEGISPPEKDKHQLFIDVQPDMGTALRARARIQINLAVSQVVDIKQVANFPDIVFPILWFEEGIDSLPDEILDLMKVATNIPPRAKFILTIALFGLGGFLFVVAVICLVRKSHRQSTLHLEGSNYLATASVDQAKKKAKMDNGMSSKSN

SEQ ID NO: 67 - protein, 338 aa, Homo sapiens
MVRRVQPDRKQLPLVLLRLLCLLPTGLPVRSVDFNRGTDNITVRQGDTAILRCVVEDKNSKVAWLNRSGIIFAGHDKWSLDPRVELEKRHSLEYSLRIQKVDVYDEGSYTCSVQTQHEPKTSQVYLIVQVPPKISNISSDVTVNEGSNVTLVCMANGRPEPVITWRHLTPTGREFEGEEEYLEILGITREQSGKYECKAANEVSSADVKQVKVTVNYPPTITESKSNEATTGRQASLKCEASAVPAPDFEWYRDDTRINSANGLEIKSTEGQSSLTVTNVTEEHYGNYTCVAANKLGVTNASLVLFRPGSVRGINGSISLAVPLWLLAASLLCLLSKC

SEQ ID NO: 68 - protein, 338 aa, Pan troglodytes; identical to SEQ ID NO: 67

SEQ ID NO: 69 - protein, 338 aa, Oryctolagus cuniculus
MGARVQPDRKQLPLVLLRLLCLLPTGLPVRSVDFNRGTDNITVRQGDTAILRCVVEDKNSKVAWLNRSGIIFAGHDKWSLDPRVELEKRHSLEYSLRIQKVDVYDEGSYTCSVQTQHEPKTSQVYLIVQVPPKISNISSDVTVNEGSNVTLVCMANGRPEPVITWRHLTPTGREFEGEEEYLEILGITREQSGKYECKAANEVSSADVKQVKVTVNYPPTITESKSNEATTGRQASLKCEASAVPAPDFEWYRDDTRINSANGLEIKSTEGQSSLTVTNVTEEHYGNYTCVAANKLGVTNASLVLFRPGSVRGINGSISLAVPLWLLAASLLCLLSKC

SEQ ID NO: 70 - protein, 341 aa, Mus musculus
MVGRVQPDRKQLPLVLLRLLCLLPTGLPVRSVDFNRGTDNITVRQGDTAILRCVVEDKNSKVAWLNRSGIIFAGHDKWSLDPRVELEKRHALEYSLRIQKVDVYDEGSYTCSVQTQHEPKTSQVYLIVQVPPKISNISSDVTVNEGSNVTLVCMANGRPEPVITWRHLTPLGREFEGEEEYLEILGITREQSGKYECKAANEVSSADVKQVKVTVNYPPTITESKSNEATTGRQASLKCEASAVPAPDFEWYRDDTRINSANGLEIKSTEGQSSLTVTNVTEEHYGNYTCVAANKLGVTNASLVLFSKYAKTEPDSMQVIEFLHIDLKSIRHPLKVNPIQK

SEQ ID NO: 71 - protein, 337 aa, Xenopus laevis
MVGRSQSDRNQLPLFLLRLLCLLPTGLPVRSGDFNRSTDNMTVRQGDTAILRCFVEDKSSKVAWLNRSGIIFAVDDKWSLDPRVELEKRSPFEYSLRIQKVDVSDEGPYICSVQTNQHTKTMQVYLIVQVPPKISNISADITVNEGSNVTLMCIAYGRPEPMITWRHLTPTARDFEGEEEFLEIQGITREQSGRYECKAANEVASADVKQVRVTVNYPPIITESNSNEATTGKQAILRCEASAVPAPDFEWYKDDTRINSAQGLEIRNTGSRSVLMVANVTEEHYGNYTCVAANKLGITNTSLYLYIGPGTPIDNATSLAASLWLMANILLCLFCTC

SEQ ID NO: 72 - protein, 333 aa, Danio rerio
MSCLWIHSVFIPGFFLLFGFEGFPVISVESQRSTDNITIRQGDTTVIRCYVDDKVSKVAWLNRSNIIFAGEDKWSLDPRVELVTQGQLEYSLRIQKVDVFDEGPYTCSIQTKQQSKTSQVYLIVQVPAIIYKVSEDITVNEGSNVALTCLANGRPDPAITWRLLNPSAEALDVGEYLEISGVVRSQAGRYECKASNDVSTPDVKYVNVVVNYPPYIKDVRSSETAVGQAGVLHCEASAVPQPEFEWYRDERRLSSSQSLTIQVSGSRTVLVVANVTEEDYGNYTCVATNRLGVHNASVFLYKPGMGRDINSAGCICQSLWLLLLCVSSALLQC

SEQ ID NO: 73 - protein, 197 aa, Mus musculus
MSGSSRRLLWAATCLAVLCVSAAQPNITTLAPNVTEVPTTTTKVVPTTQMPTVLPETCASFNSCVSCVNATFTNNITCFWLHCQEANKTYCANEPLSNCSQVNRTDLCSVIPPTTPVPTNSTAKPTTRPSSPTPTPSVVTSAGTTNTTLTPTSQPERKSTFDAASFIGGIVLVLGVQAVIFFLYKFCKSKERNYHTL

SEQ ID NO: 74 - protein, 197 aa, Macaca mulatta
MSRLSRSLLWAVTCLAVLCVLSAEENPTPHTNVTSLAPTSNITSAPVTSLPLVTTPAPETCEGRNSCVSCFNASTVNTTCFWIECKDESYCSHNSTVSDCQVGNTTDFCSVPTATLVPTANSTAKPTVQPSPSTTSKTVTTSGTTNTTVTPTSQPVRKSTFDAASFIGGIVLVLGVQAVIFFLYKFCKSKERNYHTL

SEQ ID NO: 75 - protein, 194 aa, Sus scrofa
MLGLSRQLLWAVGCLAALCVLTAAKNSTILPPSTTTPWLSPPTTQTTSAPPKTLPTPAPEICENRNSCISCFDANNTCFWIECKGKSYCSDNSTVSDCHVVNGTDFCSGPTVTPLPTNSTAKTTTLPSPSSASTTATTSGTTNTTLAPTTQPMRKSTFDAASFIGGIVLVLGVQAVIFFLYKFCKSKERNYHTL

SEQ ID NO: 76 - protein, 198 aa, Bos taurus
MSGLSRPLLLAVGCLAALCVITAAGNTTLAPNVTTASSPPPTTTTVPVSPTTLSPLPVTTPAPDICGSRNSCVSCVDGNATCFWIECKGKSYCSDNSTAGDCKVVNTTGFCSVPTTTPTPTNSTAKTTTLPSTTTTSTTATTSGTTNTTLSPTIQPTRKSTFDAASFIGGIVLVLGVQAVIFFLYKFCKSKERNYHTL

SEQ ID NO: 77 - protein, 198 aa, Ovis aries
MSGLSRPLLLAVGYLAALCVITAARNTTVTPNVTTPSSPPPTTATVPVSPTTLTPPPVTTPAPDICGSRNSCISCVDGNATCFWIECKGKSYCSDNSTVSDCKVVNTTGFCAVPTTTPTPTNSTAKTTTLPSTTTTSTTATTSGTANTTLTPTIQPMRKSTFDAASFIGGIVLVLGVQAVIFFLYKFCKSKERNYHTL

SEQ ID NO: 78 - protein, 198 aa, Canis lupus familiaris
MSGLSRQLCWAAACLAALCALTAAQSFSSDPNGTTTTTQATTDAATTRVTTAAPATTPAPDPCDNRNSCVSCVNTSVDATACSWIECKEKSYCSHNTTVSDCQVVNSTQLCSAPEPTMMPTNSTAKTTTQPSSSTATTTATTSGTTNITLSPTSQPGRKSTFDAASFIGGIVLILGVQAVIFFLYKFCKSKERNYHTL

SEQ ID NO: 79 - protein, 195 aa, Rattus norvegicus
MSGASRGLFWAATCLAALCLSAAQSNSSASPNVTDPPTTTSKVVPTTLTTTKPPETCESFNSCVSCVNATLTNNITCVWLDCHEANKTYCSSELVSNCTQKTSTDSCSVIPTTPVPTNSTAKPTTRPSSPTPTPSVVTSAGATNTTVTPTSQPERKSTFDAASFIGGIVLVLGVQAVIFFLYKFCKSKERNYHTL

SEQ ID NO: 80 - protein, 354 aa, Homo sapiens
MRLAVLFSGALLGLLAAQGTGNDCPHKKSATLLPSFTVTPTVTESTGTTSHRTTKSHKTTTHRTTTTGTTSHGPTTATHNPTTTSHGNVTVHPTSNSTATSQGPSTATHSPATTSHGNATVHPTSNSTATSPGFTSSAHPEPPPPSPSPSPTSKETIGDYTWTNGSQPCVHLQAQIQIRVMYTTQGGGEAWGISVLNPNKTKVQGSCEGAHPHLLLSFPYGHLSFGFMQDLQQKVVYLSYMAVEYNVSFPHAAQWTFSAQNASLRDLQAPLGQSFSCSNSSIILSPAVHLDLLSLRLQAAQLPHTGVFGQSFSCPSDRSILLPLIIGLILLGLLALVLIAFCIIRRRPSAYQAL

SEQ ID NO: 81 - protein, 354 aa, Pan troglodytes
MRLAVLFSGALLGLLAAQGTGNDCPHKKSATLLPSFTVTPTVTESTGTTSHRTTKSHKTTTHRTTTTGTASHGPTTATHNPTTTSHGNVTVHPTSNSTATSQGPSTATHSPATTSHGNATVHPTSNSTATSPGFTSSAHPEPPPPSPSPSPTSKETIGDYTWTNGSQPCVHLQAQIQIRVMYTTQGGGEAWGISVLNPNKTKVQGSCEGAHPHLLLSFPYGHLSFGFMQDLQQKAVYLSYMAVEYNVSFPHAAQWTFSAQNASLRDLQAPLGRSFSCSNSSIILSPAVHLDLLSLRLQAAQLPHTGVFGQSFSCPSDRSILLPLIIGLILLGLLALVLIAFCIIRRRPSAYQAL

SEQ ID NO: 82 - protein, 335 aa, Bos taurus
MRLAVFFSGALLGLLAAQGTGNDCPHKKSATLLPSFTVTPTATESTPSPGTTSHRTTKSHRTTTWRISTTTHTTNTTGTTSSESPTATHSPATTTSHQNTTVHPTSNITATSPGPSTRSPHPEPPPSPSPSPGSKEAIGDYTWSNGSQPCVRLQAQIQIRVLYPTQGGGEAWGISVLNPNRTKAQGGCEGTHSHLLLSFPSGQLSFGFKQDPLQSAVYLNYMAVEYNVSFPQAVQWTFSVQNSSLRDLQTPLGHSFSCRNASIIVSPALHLDLLSLKLQAAQLSPSGAFGPSFSCPNDKSILLPLIIGLILLGLLTLVLVTFCIIRRRPPTYQPL

SEQ ID NO: 83 - protein, 335 aa, Mus musculus
MRLPVCLILLGPLIAQGTEEDCPHKKAVTLLPSFTMTPTATESTASPTTSHRPTTTSHGNVTVHTSSGPTTVTHNPATTTSHGNATISHATVSPTTNGTATSPRSSTVGPHPGPPPPSPSPRSKGALGNYTWANGSQPCVQLQAQIQIRILYPIQGGRKVKLKWGLKRAWGISVLNPNKTKVQGGCDGTHPHLSLSFPYGQLTFGFKQDLHQSPSTVYLDYMAVEYNVSFPQAAQWTFMAQNSSLRELQAPLGQSFCCGNASIVLSPAVHLDLLSLRLQAAQLPDKGHFGPCFSCNRDQSLLLPLIIGLVLLGLLTLVLIAFCITRRRQSTYQPL

SEQ ID NO: 84 - protein, 354 aa, Macaca mulatta
MRLAVLFLGALLGLLAAQGTGNDCPHKKSATLLPSFTVTPTATESTGTTSHRTTKSHKTTTHRTTTTGTTSHRPTTATHNPTTTSHRNATVHPTSNSTATSQGPSTATHRPATTSHGNATVHPTSNSTATSPGLTSSAHPGPPPPSPSPSPASKETIGDYMWTNGSQPCVHLQAQIQIRVMYTTQGGGEAWGISVLNPNKTKVQGSCEGAHPHLLLSFPYGHLSFGFMQDLQQRVVYLSYMAVEYNVSFPHAAQWTFSAQNASLRDLQAPLGQSFSCSNSSIILSPAVHLDLLSLRLQAAQLPHTGVFGQSFSCPSDRSILLPLIIGLVLLGLLALVLIAFCIVRRRPSAYQAL

SEQ ID NO: 85 - protein, 330 aa, Rattus norvegicus
MRFPVCLTLLVLLVAQGTGKDCPHKKAATLLPSFTETPTTTGSTASPTTTHRPTTTSHRPTTTSHRPTTTSHRPTTTSHRPTTTSHRPTTTSHGNATVSPTTNSPGFSTVGPHPGPPPPSPSPSPSSTGALGNYTWTNGSQPCVQLQAQIQIRILYLTQGGKKAWGLSVLNPNKTKVQGGCDSAHPHLALSFPYGQLTFGFKQDRHQSHSTVYLNYMAVEYNVSFPQAAQWTFSAQNSSLQELQAPLGQSFCCGNTSIVLSPAIHLDLLSLRLQAAQLPDKGHFGPCFSCASDQSLLLPLIIGLVLLGLLTLVLIAFCVTRRRQSTYQPL

SEQ ID NO: 86 - protein, 329 aa, Canis lupus familiaris
MRPAVFFLGALVGLLAAQGTRSDCPHKKSATLLPSFTVTPTATESTGSPGTTSHSTTTAETTSHAPNTTTHQAPTTPGHRNTTIHPTTSNSTSNTTGTTGTGKPHTSTSYTQPGPGPRPPPPSPGPGPQDAIGDYTWTTGSQPCARLQARIQIGVVYPTQAGGQAWGISVLNPNSTKPWGDCDGARPHLLLSFPFGQLSFGFTQEPQQGSVYLDYLALQYNVSFPQAAQWTFSGQNASLRALQAPLGQSFSCRNASILLTPALRLDLLHLKLQAAQLPPSGAFGPSFSCPSEHFNLLPLIVGVISLGLLALALVTFCIIRRRPPTYQPL

SEQ ID NO: 87 - protein, 322 aa, Equus caballus
MRLAVLFSGALLGLLAAQETGNDCPHKKSATLLPSFTVTPTATESTASPGTTSHQTTQSHRTTTTGTTSDHPTTATHNPTTTSHGNTTVHPTTSNSTVTSPGSASSSPHPRPPPPSPSPSPGSKEAIGDYIWTNGSQPCVRLQAQIQIRVLYPTLGGGKAWGISVLNPNKTKAQGGCAHPHLLLSFPYGQLSFGFKQEPLQSTVYLNYIAVEYNVSFPQAAQWTFLVQNSSLRDLQAPLGQRFSCRNASIALSPAFHLDLLSLKLQAAQLTPTGAFGPSFSCPSDQSILLPLIIGLILLGLFALVLITFCVIRRRPPTYQAL

SEQ ID NO: 88 - protein, 305 aa, Oryctolagus cuniculus
MRLPVLFLALLGLHAASSGTTSHRTTKNPHTTSHSTATPGTTSHRPTTATPTTGHGNVTVHPTTSNTTSNTTTTTGTSPGFSTSTPHPGPPPPPPSPSPGSREAVGNYTWTNGSQPCVQLQAQIQIRVLYPTQGGGQAWGMSVLNPNRTKAQGGCEGPRPHLLLSFPYGQLSFGFKQDPGQGQSAVYLSYLAVEYNVSFPQAARWTFSAQNASLRDLQAPLGQSFSCRNASIAVSPALHLDLLSLRVQAAQLPRTGIFGPSFSCPADHPSILVPLIIGLILVGLLALVLVAFCIARRRPSAYQAL

SEQ ID NO: 89 - protein, 291 aa, Sus scrofa
MTLAVLFLGALLGLLAESTTSHRTTTPRTTTTGTTSHGPTTVTHNPATTTSHGNATVHPTSSSTATSPGSSTRPPHPGPPPPSPSPSPGSQEAIGDYTWTNGSQPCVQLQAQIQIRVLYPTQGGGEAWGISVLNPNKTKALGGCEGAHPHVRLSFPYGQLTFGFKQQPQESTVYLNYMAVEYNVSFPRAAQWTFSVQNSSLRDLQTPVGRSYSCRNASIILSTAFHLDLLSLKLQAAQLPPTGNFGPSFSCPSDQTILLPLIIGLIFLGLLILVLVTFCIIRRRPPAYQPL

SEQ ID NO: 90 - protein, 354 aa, Papio anubis
MRLAVLFSGALLGLLAAQGTGNDCPHKKSATLLPSFTVTPTATESTGTTSHRTTKSHKTTTHRTTTTGTTSHRPTTATHNPNTTSHRNATVHPTSNSTATSQGPSTATHRPATTSHGNATVHPTSNSTATSPGLTSSAHPGPPPPSPSPSPASKETIGDYMWTNGSQPCVHLQAQIQIRVMYTTQGGGEAWGISVLNPNKTKVQGSCEGAHPHLLLSFPYGHLSFGFMQDLQQRVVYLSYMAVEYNVSFPHAAQWTFSAQNASLRDLQAPLGQSFSCSNSSIILSPAVHLDLLSLRLQAAQLPHTGVFGQSFSCPSDRSILLPLIIGLVLLGLLALVLIAFCIVRRRPSAYQAL

SEQ ID NO: 91 - protein, 323 aa, Monodelphis domestica
MRLSLLLSGILLGLLAEQGAGDKCPQEKSVTLVPSFTVTTIATERSTTSPETTTSSGSTATTYRTSTAATTPHSNSTATSYSTTSEGTAVTHGTTTSPRNTSTTSTSQSVPVPPSPQPTSSPSGAVGDYIGANGSQLCVHLRAQIQMRVLYQASGGGKLWGIFVLNPNRTMAQGNCEANHSSLILSFPNGKLIFGFKQDSIKKIVYLSHLATEFNVSFPSATRWIFSVENSSLQDLQTPLGHSFSCRNRSIALSPDIHLDLLSLQLQAAQLSSSGAFGAAFSCSADLNILVPLVVGLVLLTLLILVLSAFCISRRRPPAYQPL

SEQ ID NO: 92 - protein, 263 aa, Ornithorhynchus anatinus
MGLTLPLPAQGSQCRANCPHKKSATLVPSFTVTPTATSGPTTTAHQTTTDHGTTTSHETTTSQGTSTHGTSTPHTTTTGHGTTTGHQNTSHSTTTSHGTSTPHKTTTRHPTTSHGTTTSHGTSTGHWTARPTIRPGPPPPPPSPGKAVGNYTVFNGSQPCLRLRAEIRLWVLYQAQEEGEAPPVSGAASFPPPRPRPVAGEGDGERSRVTPVASAMTVEGGSRAGFAMLGAEVRSRAPSLGRAGKTRLRIHQPVVVLQHTYYV

SEQ ID NO: 93 - protein, 280 aa, Homo sapiens
MDLQGRGVPSIDRLRVLLMLFHTMAQIMAEQEVENLSGLSTNPEKDIFVVRENGTTCLMAEFAAKFIVPYDVWASNYVDLITEQADIALTRGAEVKGRCGHSQSELQVFWVDRAYALKMLFVKESHNMSKGPEATWRLSKVQFVYDSSEKTHFKDAVSAGKHTANSHHLSALVTPAGKSYECQAQQTISLASSDPQKTVTMILSAVHIQPFDIISDFVFSEEHKCPVDEREQLEETLPLILGLILGLVIMVTLAIYHVHHKMTANQVQIPRDRSQYKHMG

SEQ ID NO: 94 - protein, 280 aa, Pan troglodytes
MDLRGRAVPSIDRLRVLLMLFHTMAQIMAEQEVENLSGLSTNPEKDIFVVRENGTTCLMAEFAAKFIVPYDVWASNYVDLITEQADIALTRGAEVKGRCGHSESELQVFWVDRAYALKMLFVKESHNMSKGPEATWRLSKVQFVYDSSEKTHFKDAVSAGKHTANSHHLSALVTPAGKSYECQAQQTISLASSDLQKTVTMILSAVHIQPFDIISDFVFSEEHKCPVDEREQLEETLPLILGLILGLVIMVTLAIYHVHHKMTANQVQIPRDRSQYKHMG

SEQ ID NO: 95 - protein, 280 aa, Macaca mulatta
MDLQGRAVPSVDRLRVLLMLFHTMAQIMAEQEVENLSGLSTNPEKDIFVVRENGTTCLMAEFAAKFIVPYDVWASNYVDLITEQADIALTRGAEVKGRCGHSESELQVFWVDRAYALKMLFVKESHNTSKGPEATWRLSKVQFVYDSSEKTHFKDAVSAGKHTANSHHLSALVTPAGKSYECQAQQTISLASSDPQKMVTMILSAVHIQPFDIISDFVFSEEHKCPVDEREQLEETLPLILGLILGLVIVVTLTIYHVHHKMTANQVQIPRDRSQYKHMG

SEQ ID NO: 96 - protein, 280 aa, Canis lupus familiaris
MDLRGRAFPSVYRLRVLLMLFYTMARITAEQEVENLSGLSTNPEKDIFVVRENGTTCLMAEFAAKFIVPYDVWASNYVDLITEQADISLTRGAEVKGHCGHNESELQVFWVDRAYALKMLFVKESRNASKGPEATWRLSKVQFVYDSSEKTHFKDAVSAGKHTANSHRLSALVTPAGKSYECQAQQSISLASSDPQKTVTMILSAVHIQPFDIISDFVFSEEHKCPVDEREQLEETLPLILGLILGLVIVVTLAIYHIHHKMTANQVQIPRDRSQYKHMG

SEQ ID NO: 97 - protein, 280 aa, Bos taurus
MDLRRRALLGVDGLRVLLMLFHTVTRIMAEQEVENLSGLSTNPEKDIFVVRENGTTCLMAEFAAKFIVPYDVWASNYVDLITEQADISLTRGAEVKGHCGHDESELQVFWVDRAYALKMLFLKESHNTPKGPEATWKLSKVQFVYDSSEKTHFKDAVSAGKHTANSHHLSALVTPAGKSYECQAQQTISLASSDPQKTVTMILSAVHIQPFDIISDFVFSEEHKCPVDEREQLEETLPLILGLILGLVIVVTLVIYHIHHKMTANQVQIPRDRSQYKHMG

SEQ ID NO: 98 - protein, 280 aa, Mus musculus
MDLRVRTLLGGDRLRILLMFFHVMVQTVAEQEVENLSGLSTNPEKDIFVVRENGTTCLMAEFAAKFIVPYDVWASNYVDLITEQAEISLTRGAEVKGHCGHNESELEVFWVDHAYTLRMLFVKESHNTSKGPEATWNLNKVHFVYDSSEKTHFKAPVKVNKYIASSHHLSALVTPAGMSYECQAQQTISLASSDPQKTVTMILSAVHIQPFDIISDFVFSEEHKCPVDEQEQLEETLPLILGLILGLVIVITLVIYHIHHKMTANQVQIPRDRSQYKHMG

SEQ ID NO: 99 - protein, 280 aa, Rattus norvegicus
MDLRGRALLGGDRLRILLMFFHAMAQTVAEQEVENLSGLSTNPEKDIFVVRENGTTCLMAEFAAKFIVPYDVWASNYVDLITEQAEISLTRGAEVKGRCGHNESELQVFWVDRAYTLKMLFVKESHNTSKGLEATWKLSKVQFVYDSSEKTHFKDAVSAGKHTANSHHLSALVTPAGMSYECQAQQTISLASSDPQKTVTMILSAVHIQPFDIISDFVFSEEHKCPVDEREQLEETLPLILGLILGLVIVITLVIYHIHHKMTANQVQIPRDRSQYKHMG

SEQ ID NO: 100 - protein, 299 aa, Gallus gallus
MAAGRLPGLLFLLHAAARLAAEQEVENLSGLSPNPEKDIFVVRENRTTCLMAEFAAKFVVPYDVWASNYVDLITEQADIPLSRGAEMKGKCGTNESELEISWLERAYTLKLFFLKVRGCPRRLGRGRCAAALRGPDQPCPPQEGHNTSRGPEAFWRLSRIQFSYDTSERTYFKDAVSPGKHTASSHRLSALVTPAGKSYECQAQQTISLISSDHQKSVQLLLSEVRIQPFDITADFVFSEEHKCPVDQREQLEETLPLILGLILGLVIVITLCVYHIHHKLTANQVQIPRDRSQYKHMG

SEQ ID NO: 101 - protein, 276 aa, Xenopus tropicalis
MDYRACTSALRMPVLLLLLCTFSCNLAEQEVENLSGLSSNPDKNIFAIRENGTTCLMAEFSARILVPYEVPSSNEVDWDLEEASIQLPRDTEIRGKCWNNESELHLSWLDKAYTLKLFFSKEGQDASKSRSWKMSKIQFLYDPSEHTIFKSGARPGRHTANSHHLSLMVTPAGMSYECEATQRISLTSTDHQKIVVLYLSEVHLQPFDIKSDFVYSEEYKCPTDQRKQLEETLPLILGLTLGVAILIIVAVYHIHHKMTANQVQIPRDRSLYKHMG

SEQ ID NO: 102 - protein, 338 aa, Rattus norvegicus
MVGRVQPDRKQLPLVLLRLLCLLPTGLPVRSVDFNRGTDNITVRQGDTAILRCVVEDKNSKVAWLNRSGIIFAGHDKWSLDPRVELEKRHALEYSLRIQKVDVYDEGSYTCSVQTQHEPKTSQVYLIVQVPPKISNISSDVTVNEGSNVTLVCMANGRPEPVITWRHLTPLGREFEGEEEYLEILGITREQSGKYECKAANEVSSADVKQVKVTVNYPPTITESKSNEATTGRQASLKCEASAVPAPDFEWYRDDTRINSANGLEIKSTEGQSSLTVTNVTEEHYGNYTCVAANKLGVTNASLVLFRPGSVRGINGSISLAVPLWLLAASLFCLLSKC

SEQ ID NO: 103 - protein, 338 aa, Equus caballus
MVGRVQPDRKQLPLVLLRLLCLLPTGLPVRSVDFNRGTDNITVRQGDTAILRCVVEDKNSKVAWLNRSGIIFAGHDKWSLDPRVELEKRHSLEYSLRIQKVDVYDEGSYTCSVQTQHEPKTSQVYLIVQVPPKISNISSDVTVNEGSNVTLVCMANGRPEPVITWRHLTPTGREFEGEEEYLEILGITREQSGKYECKAANEVSSADVKQVKVTVNYPPTITESKSNEATTGRQASLKCEASAVPAPDFEWYRDDTRITSANGLEIKSTEGQSSLTVANVTEEHYGNYTCVAANNLGVTNASLVLFRPGSVRGINGSISLAVPLWLLAASLLCLLSKC

SEQ ID NO: 104 - protein, 338 aa, Sus scrofa
MVARVQPDRKQLPLVLLRLLCLLPTGLPVRSVDFNRGTDNITVRQGDTAILRCVVEDKNSKVAWLNRSGIIFAGHDKWSLDPRVELEKRHSLEYSLRIQKVDVYDEGSYTCSVQTQHEPKTSQVYLIVQVPPKISNISSDVTVNEGSNVTLVCMANGRPEPVITWRHLTPTGRELEGEEEYLEILGITREQSGKYECKAANEVSSADVKQVKVTVNYPPTITESKSNEATTGRKASLKCEASAVPAPDFEWYRDDTRINSANGLEIKSTEGQSSLTVTNVTEEHYGNYTCVAANNLGVTNASLVLFRPGSVRGINGSISLAVPLWLLAASLLCLLSKC

SEQ ID NO: 105 - protein, 338 aa, Bos taurus
MVARVQPDRKQLPLVLLRLLCLLPTGLPVRSVDFNRGTDNITVRQGDTAILRCVVEDKNSKVAWLNRSGIIFAGHDKWSLDPRVELEKRHSLEYSLRIQKVDVYDEGSYTCSVQTQHEPKTSQVYLIVQVPPKISNISSDVTVNEGSNVTLVCMANGRPEPVITWRHLTPTGREFEGEEEYLEILGITREQSGKYECKAANEVSSADVKQVKVTVNYPPTITESKSNEATTGRKASLKCEASAVPAPDFEWYRDDTRINSANGLEIKSTEGQSSLTVTNVTEEHYGNYTCVAANNLGMTNASLVLFRPGSVRGINGSISLAVPLWLLAASLLCLLSKC

SEQ ID NO: 106 - protein, 417 aa, Anopheles gambiae str. PEST
MSFAGEAASQILNKAEPLFISRSEAFKFAVGDTITLPCEVASPGTYVLAWKRGIAILTAGSVKVTPDPRVRLVNGYSLQIRDAVPQDAGDYICQIAMLDPREITHSVEILVPPKITHVTSGGHLQVRKGSPVRLECSATGNPMPNITWTRKNNLLPNGEEQFTNPVYVIENMDRHKGGTYICTANNGVGQVATSQIILHVLYPPEISVENPTVYSGEGQEAMLVCIVHGESQPEVLWHKDTMQIDQTERHVIENRGARHTLIIRKVHPQDFGNYSCIADNQLGKTRKTVTLTGKPKTAVFRSVPNSQWKDKYNISWIVDSHSPIEEFKLYYRQMTFSIGQLQPLQTDWRDIVLPAFPYSHHYTQGMSYLIRGLEPDQQYEARVQSRNRYGWSDFSESFLFTTSNTGKWMGQCCTNPG

SEQ ID NO: 107 - protein, 334 aa, Xenopus tropicalis
MRPCLLHSIWMLGFVLCLLSLQGLPVRSGDFNRSTDNITVRQGDTAILRCFVEDRSSRVAWLNRSGIIFAGDDKWSLDPRVELEKRSLLEYSLRIQKVDVSDEGPYTCSVQTKQHTKTTQVYLIVQVPPKISNISADITVNEGSNVTLMCIAYGRPEPMITWRHLTPTARDFEGEEEFLEIQGITREQSGRYECKAANEVASADVKQVRVTVNYPPIITESKSNEATTGKQAILRCEASAVPAPDFEWYKDDTRINSAQGLEIRNTGSRSVLMVANVTEEHYGNYTCVAANKLGITNTSLYLYIGPGTPIDSATSLAASLWLMANLLFCLFCTC

SEQ ID NO: 108 - protein, 338 aa, Canis lupus familiaris
MLGARRPPRSQLPLVLLRLLCLLPTGLPVRSVDFNRGTDNITVRQGDTAILRCVVEDKNSKVAWLNRSGIIFAGHDKWSLDPRVELEKRHSLEYSLRIQKVDVYDEGSYTCSVQTQHEPKTSQVYLIVQVPPKISNISSDVTVNEGSNVTLVCMANGRPEPVITWRHLTPTGREFEGEEEYLEILGITREQSGKYECKAANEVSSADVRQVKVTVNYPPTITESKSNEATTGRKASLKCEASAVPAPDFEWYRDDTRINSANGLEIKSTEGQSSLTVTNVTEEHYGNYTCVAANNLGVTNASLVLFRPGSVRGINGSISLAVPLWLLAASLLCLLSKC

SEQ ID NO: 109 - protein, 338 aa, Monodelphis domestica
MVGRVHPDRKQLPLVLLRLLCLLPTGLPVRGVDFTRGTDNITVRQGDTAILRCYVEDKSSKVAWLNRSGIIFAGHDKWSLDPRVELEKRTALEYSLRIQKVDVYDEGSYTCSVQTQHQPKTSQVYLIVQVPPKISNISSDVTVNEGSNVTLVCMANGRPEPVITWRHLTPTGREFEGEEEYLEILGITREQSGKYECKAANEVSSADVKQVKVTVNYPPTITESKSNEATTGRQASLKCEASAVPAPDFEWYRDDTRINSANGLEIKSIEGQSLLMVTNVTEEHYGNYTCVAANKLGVTNASLILFRPGSVRGINGSISLAVPLWLLAASLFCLLSKC

SEQ ID NO: 110 - protein, 338 aa, Gallus gallus
MVARAQPDRKQLPLVLLRLLCLLPTGLPVRSVDFTRGTDNITVRQGDTAILRCFVEDRSSKVAWLNRSGIIFAGEDKWSLDPRVELEKRSPLEYSLRIQKVDVYDEGSYTCSVQTQHHPKTSQVYLIVQVPPKISNISSDITVNEGSNVTLVCMANGRPEPVITWRHLTPTGKEFEGEEEYLEILGITREQSGKYECKAANEVASADVKQVRVTVNYPPTITESKSNEAATGRQALLRCEASAVPTPDFEWYRDDTRINSANGLEIKSTGSQSLLMVANVTEEHYGNYTCVAANKLGVTNASLYLYRPGTGRVDNGSVSLAVPLWLLAASLLCLLSKC

SEQ ID NO: 111 - protein, 335 aa, Taeniopygia guttata
MRTYWLHSIWVLGFFLSLFSLQGLPVRSVDFTRGTDNITVRQGDTAILRCYVEDRSSKVAWLNRSGIIFAGEDKWSLDPRVELEKRNPLEYSLRIQKVDVYDEGSYTCSVQTQHHPKTSQVYLIVQVPPKISNISSDITVNEGSNVTLVCMANGRPEPVITWRHLTPTGKEFEGEEEYLEILGITREQSGKYECKAANEVASADVKQVRVTVNYPPTITESKSNEAATGRQALLRCEASAVPTPDFEWYRDDTRINSANGLEIKSTGSQSLLMVANVTEEHYGNYTCVAANKLGVTNASLYLYRPGTGRVDNGSMSLAVPLWLLAASLLCLLSKC

SEQ ID NO: 112 - protein, 334 aa, Xenopus tropicalis; identical to SEQ ID NO: 107

SEQ ID NO: 113 - protein, 337 aa, Oreochromis niloticus
MQVGRKSCWRQLQASFFRLLCLIPTGFPVRSVDMQRATDNITIRQGDTAIIRCYVDDKVSKVAWLNRSNIIFAGQDKWSLDPRVDLVTKGQLEYSLRIQKVDVYDEGSYTCSIQTKQQPKTSQVYLIVQVPASIYQVSNDITVNEGSNVTLSCLANGRPDPAITWRLLNPSAEPLDGEEYLDIIGIMRTQAGRYECKASNDVATPDVKYVNVIVNYPPTIKKTQSSETPVGRNGTLRCEVTAVPTPEFEWYRDDKRLANTQSITIQTSGTTTSLTIANITEEDYGNYTCVASNRLGVQNASLFLYRPGTGRDINGSACVSQSLWLLLASFACLFLKC

SEQ ID NO: 114 - protein, 561 aa, Artificial Sequence
  Synthetic Construct
MESRGRRCPEMISVLGPISGHVLKAVFSRGDTPVLPHETRLLQTGIHVRVSQPSLILVSQYTPDSTPCHRGDNQLQVQHTYFTGSEVENVSVNVHNPTGRSICPSQEPMSIYVYALPLKMLNIPSINVHHYPSAAERKHRHLPVADAVIHASGKQMWQARLTVSGLAWTRQQNQWKEPDVYYTSAFVFPTKDVALRHVVCAHELVCSMENTRATKMQVIGDQYVKVYLESFCEDVPSGKLFMHVTLGSDVEEDLTMTRNPQPFMRPHERNGFTVLCPKNMIIKPGKISHIMLDVAFTSHEHFGLLCPKSIPGLSISGNLLMNGQQIFLEVQAIRETVELRQYDPVAALFFFDIDLLLQRGPQYSEHPTFTSQYRIQGKLEYRHTWDRHDEGAAQGDDDVWTSGSDSDEELVTTERKTPRVTGGGAMAGASTSAGRKRKSASSATACTSGVMTRGRLKAESTVAPEEDTDEDSDNEIHNPAVFTWPPWQAGILARNLVPMVATVQGQNLKYQEFFWDANDIYRIFAELEGVWQPAAQPKRRRHRQDALPGPCIASTPKKHRG

SEQ ID NO: 115 - protein, 146 aa, Artificial Sequence
  Synthetic Construct
LLQTGIHVRVSQPSLGPGPGALPLKMLNIPSINVHGPGPGDQYVKVYLESFCEDVGPGPGIIKPGKISHIMLDVAFTSHGPGPGPQYSEHPTFTSQYRIQGKLGPGPGPPWQAGILARNLVPMVGPGPGKYQEFFWDANDIYRIFA

SEQ ID NO: 116 - protein, 146 aa, Artificial Sequence
  Synthetic Construct
LLQTGIHVRVSQPSLPMGLPALPLKMLNIPSINVHPMGLPDQYVKVYLESFCEDVPMGLPIIKPGKISHIMLDVAFTSHPMGLPPQYSEHPTFTSQYRIQGKLPMGLPPPWQAGILARNLVPMVPMGLPKYQEFFWDANDIYRIFA

SEQ ID NO: 117 - protein, 906 aa, Human herpesvirus 5
  Strain AD169
MESRIWCLVVCVNLCIVCLGAAVSSSSTSHATSSTHNGSHTSRTTSAQTRSVYSQHVTSSEAVSHRANETIYNTTLKYGDVVGVNTTKYPYRVCSMAQGTDLIRFERNIICTSMKPINEDLDEGIMVVYKRNIVAHTFKVRVYQKVLTFRRSYAYIYTTYLLGSNTEYVAPPMWEIHHINKFAQCYSSYSRVIGGTVFVAYHRDSYENKTMQLIPDDYSNTHSTRYVTVKDQWHSRGSTWLYRETCNLNCMLTITTARSKYPYHFFATSTGDVVYISPFYNGTNRNASYFGENADKFFIFPNYTIVSDFGRPNAAPETHRLVAFLERADSVISWDIQDEKNVTCQLTFWEASERTIRSEAEDSYHFSSAKMTATFLSKKQEVNMSDSALDCVRDEAINKLQQIFNTSYNQTYEKYGNVSVFETSGGLVVFWQGIKQKSLVELERLANRSSLNITHRTRRSTSDNNTTHLSSMESVHNLVYAQLQFTYDTLRGYINRALAQIAEAWCVDQRRTLEVFKELSKINPSAILSAIYNKPIAARFMGDVLGLASCVTINQTSVKVLRDMNVKESPGRCYSRPVVIFNFANSSYVQYGQLGEDNEILLGNHRTEECQLPSLKIFIAGNSAYEYVDYLFKRMIDLSSISTVDSMIALDIDPLENTDFRVLELYSQKELRSSNVFDLEEIMREFNSYKQRVKYVEDKVVDPLPPYLKGLDDLMSGLGAAGKAVGVAIGAVGGAVASVVEGVATFLKNPFGAFTIILVAIAVVIITYLIYTRQRRLCTQPLQNLFPYLVSADGTTVTSGSTKDTSLQAPPSYEESVYNSGRKGPGPPSSDASTAAPPYTNEQAYQMLLALARLDAEQRAQQNGTDSLDGQTGTQDKGQKPNLLDRLRHRKNGYRHLKDSDEEENV

SEQ ID NO: 118 - protein, 863 aa, Human herpesvirus 5
  Strain AD169
VSSSSTSHATSSTHNGSHTSRTTSAQTRSVYSQHVTSSEAVSHRANETIYNTTLKYGDVVGVNTTKYPYRVCSMAQGTDLIRFERNIICTSMKPINEDLDEGIMVVYKRNIVAHTFKVRVYQKVLTFRRSYAYIYTTYLLGSNTEYVAPPMWEIHHINKFAQCYSSYSRVIGGTVFVAYHRDSYENKTMQLIPDDYSNTHSTRYVTVKDQWHSRGSTWLYRETCNLNCMLTITTARSKYPYHFFATSTGDVVYISPFYNGTNRNASYFGENADKFFIFPNYTIVSDFGRPNAAPETHRLVAFLERADSVISWDIQDEKNVTCQLTFWEASERTIRSEAEDSYHFSSAKMTATFLSKKQEVNMSDSALDCVRDEAINKLQQIFNTSYNQTYEKYGNVSVFETSGGLVVFWQGIKQKSLVELERLANRSSLNITHRTRRSTSDNNTTHLSSMESVHNLVYAQLQFTYDTLRGYINRALAQIAEAWCVDQRRTLEVFKELSKINPSAILSAIYNKPIAARFMGDVLGLASCVTINQTSVKVLRDMNVKESPGRCYSRPVVIFNFANSSYVQYGQLGEDNEILLGNHRTEECQLPSLKIFIAGNSAYEYVDYLFKRMIDLSSISTVDSMIALDIDPLENTDFRVLELYSQKELRSSNVFDLEEIMREFNSYKQRVKYVEDKVVDPLPPYLKGLDDLMSGLGAAGKAVGVAIGAVGGAVASVVEGVATFLKNPTRQRRLCTQPLQNLFPYLVSADGTTVTSGSTKDTSLQAPPSYEESVYNSGRKGPGPPSSDASTAAPPYTNEQAYQMLLALARLDAEQRAQQNGTDSLDGQTGTQDKGQKPNLLDRLRHRKNGYRHLKDSDEEENV

SEQ ID NO: 119 - protein, 79 aa, Artificial Sequence
  Synthetic Construct
TTSAQTRSVYSQHVTGPGPGQLIPDDYSNTHSTRYVGPGPGVSVFETSGGLVVFWQGPGPGNSAYEYVDYLFKRMIDLS

SEQ ID NO: 120 - protein, 79 aa, Artificial Sequence
  Synthetic Construct
TTSAQTRSVYSQHVTPMGLPQLIPDDYSNTHSTRYVPMGLPVSVFETSGGLVVFWQPMGLPNSAYEYVDYLFKRMIDLS

SEQ ID NO: 121 - protein, 491 aa, Human herpesvirus 5
  Strain AD169
MESSAKRKMDPDNPDEGPSSKVPRPETPVTKATTFLQTMLRKEVNSQLSLGDPLFPELAEESLKTFEQVTEDCNENPEKDVLAELVKQIKVRVDMVRHRIKEHMLKKYTQTEEKFTGAFNMMGGCLQNALDILDKVHEPFEEMKCIGLTMQSMYENYIVPEDKREMWMACIKELHDVSKGAANKLGGALQAKARAKKDELRRKMMYMCYRNIEFFTKNSAFPKTTNGCSQAMAALQNLPQCSPDEIMAYAQKIFKILDEERDKVLTHIDHIFMDILTTCVETMCNEYKVTSDACMMTMYGGISLLSEFCRVLCCYVLEETSVMLAKRPLITKPEVISVMKRRIEEICMKVFAQYILGADPLRVCSPSVDDLRAIAEESDEEEAIVAYTLATAGVSSSDSLVSPPESPVPATIPLSSVIVAENSDQEESEQSDEEEEEGAQEEREDTVSVKSEPVSEIEEVAPEEEEDGAEEPTASGGKSTHPMVTRSKADQ

SEQ ID NO: 122 - protein, 156 aa, Artificial Sequence
  Synthetic Construct
VLAELVKQIKVRVDMVRHRIKEHMLKKYTQGPGPGIVPEDKREMWMACIKELHGPGPGKDELRRKMMYMCYRNIEFFTKNSAFPKTTGPGPGSVMKRRIEEICMKVFAQYIGPGPGAIAEESDEEEAIVAYGPGPGVKSEPVSEIEEVAPEEEEDG

SEQ ID NO: 123 - protein, 156 aa, Artificial Sequence
  Synthetic Construct
VLAELVKQIKVRVDMVRHRIKEHMLKKYTQPMGLPIVPEDKREMWMACIKELHPMGLPKDELRRKMMYMCYRNIEFFTKNSAFPKTTPMGLPSVMKRRIEEICMKVFAQYIPMGLPAIAEESDEEEAIVAYPMGLPVKSEPVSEIEEVAPEEEEDG

SEQ ID NO: 124 - protein, 79 aa, Human betaherpesvirus 5
MLSVMVSSSLVLIVFFLGASEEAKPATTTTIKNTKPQCRPEDYATRLQDLRVTFHRVKPTLVGHVGTVYCDGLSFPRVG

SEQ ID NO: 125 - protein, 54 aa, Artificial Sequence
  Synthetic Construct
ATTTTIKNTKPQCRPEDYATRLQDLRVTFHRVKPTLVGHVGTVYCDGLSFPRVG

SEQ ID NO: 126 - protein, 354 aa, Human betaherpesvirus 5
MTPTTTTAELTTEFDYDEDATPCVFTDVLNQSKPVTLFLYGVVFLFGSIGNFLVIFTITWRRRIQCSGDVYFINLAAADLLFVCTLPLWMQYLLDHNSLASVPCTLLTACFYVAMFASLCFITEIALDRYYAIVYMRYRPVKQACLFSIFWWIFAVIIAIPHFMVVTKKDNQCMTDYDYLEVSYPIILNVELMLGAFVIPLSVISYCYYRISRIVAVSQSRHKGRIVRVLIAVVLVFIIFWLPYHLTLFVDTLKLLKWISSSCEFERSLKRALILTESLAFCHCCLNPLLYVFVGTKFRQELHCLLAEFRQRLFSRDVSWYHSMSFSRRSSPSRRETSSDTLSDEVCRVSQIIP

SEQ ID NO: 127 - protein, 191 aa, Artificial Sequence
  Synthetic Construct
MTPTTTTAELTTEFDYDEDATPCVFTDVLNQSKPVTTWRRRIQCSGDDHNSLEIALDRYYAIVYMRYRPVKQTKKDNQCMTDYDYLEVSYPRISRIVAVSQSRHKGRIVRDTLKLLKWISSSCEFERSLKRGTKFRQELHCLLAEFRQRLFSRDVSWYHSMSFSRRSSPSRRETSSDTLSDEVCRVSQIIP

SEQ ID NO: 128 - protein, 327 aa, Homo sapiens
MLPRVGCPALPLPPPPLLPLLPLLLLLLGASGGGGGARAEVLFRCPPCTPERLAACGPPPVAPPAAVAAVAGGARMPCAELVREPGCGCCSVCARLEGEACGVYTPRCGQGLRCYPHPGSELPLQALVMGEGTCEKRRDAEYGASPEQVADNGDDHSEGGLVENHVDSTMNMLGGGGSAGRKPLKSGMKELAVFREKVTEQHRQMGKGGKHHLGLEEPKKLRPPPARTPCQQELDQVLERISTMRLPDERGPLEHLYSLHIPNCDKHGLYNLKQCKMSLNQRGECWCVNPNTGKLIQGAPTIRGDPECHLFYNEQQEARGVHTQRMQ

SEQ ID NO: 129 - protein, 175 aa, Human cytomegalovirus
  Strain AD169
MLSVMVSSSLVLIVFFLGASEEAKPATTTIKNTKPQCRPEDYATRLQDLRVTFHRVKPTLQREDDYSVWLDGTVVKGCWGCSVMDWLLRRYLEIVFPAGDHVYPGLKTELHSMRSTLESIYKDMRQCPLLGCGDKSVISRLSQEAERKSDNGTRKGLSELDTLFSRLEEYLHSRK

SEQ ID NO: 130 - protein, 150 aa, Artificial Sequence
  Synthetic Construct
ATTTIKNTKPQCRPEDYATRLQDLRVTFHRVKPTLQREDDYSVWLDGTVVKGCWGCSVMDWLLRRYLEIVFPAGDHVYPGLKTELHSMRSTLESIYKDMRQCPLLGCGDKSVISRLSQEAERKSDNGTRKGLSELDTLFSRLEEYLHSRK

SEQ ID NO: 131 - protein, 176 aa, Human cytomegalovirus
  Strain Merlin
MKPLVMLICFGVILLQLGVTKVCQHNEVQLGNECCPPCGLGQRVTKVCTERTSVTCTPCPNGTYVSGLYNCTDCTQCNVTQVMIRNCTSTNNTVCAPKNHTYFSTPGVQHHKQRQQNHTAHITVKQGKSGRHTLAWLSLFIFLVGIILLILYLIAAYRSERCQQCCSIGKIFYRTL

SEQ ID NO: 132 - protein, 135 aa, Artificial Sequence
  Synthetic Construct
KVCQHNEVQLGNECCPPCGLGQRVTKVCTERTSVTCTPCPNGTYVSGLYNCTDCTQCNVTQVMIRNCTSTNNTVCAPKNHTYFSTPGVQHHKQRQQNHTAHITVKQGKSGRHTAAYRSERCQQCCSIGKIFYRTL

SEQ ID NO: 133 - protein, 338 aa, Human cytomegalovirus
  Strain Merlin
MCRRESLRTLPWLFWVLLSCPRLLEYSSSSFPFATADIAEKMWAENYETTSPAPVLVAEGEQVTIPCTVMTHSWPMVSIRARFCRSHDGSDELILDAVKGHRLMNGLQYRLPYATWNFSQLHLGQIFSLTFNVSTDTAGMYECVLRNYSHGLIMQRFVILTQLETLSRPDEPCCTPALGRYSLGDQIWSPTPWRLRNHDCGMYRGFQRNYFYIGRADAEDCWKPACPDEEPDRCWTVIQRYRLPGDCYRSQPHPPKFLPVTPAPPADIDTGMSPWATRGIAAFLGFWSIFTVCFLCYLCYLQCCGRWCPTPGRGRRGGEGYRRLPTYDSYPGVKKMKR

SEQ ID NO: 134 - protein, 281 aa, Artificial Sequence
  Synthetic Construct
DIAEKMWAENYETTSPAPVLVAEGEQVTIPCTVMTHSWPMVSIRARFCRSHDGSDELILDAVKGHRLMNGLQYRLPYATWNFSQLHLGQIFSLTFNVSTDTAGMYECVLRNYSHGLIMQRFVILTQLETLSRPDEPCCTPALGRYSLGDQIWSPTPWRLRNHDCGMYRGFQRNYFYIGRADAEDCWKPACPDEEPDRCWTVIQRYRLPGDCYRSQPHPPKFLPVTPAPPADIDTGMSPWATRYLQCCGRWCPTPGRGRRGGEGYRRLPTYDSYPGVKKMKR

SEQ ID NO: 135 - protein, 215 aa, Human cytomegalovirus
  Strain AD169
MNLVMLILALWAPVAGSMPELSLTLFDEPPPLVETEPLPPLSDVSEYRVEYSEARCVLRSGGRLEALWTLRGNLSVPTPTPRVYYQTLEGYADRVPTPVEDVSESLVAKRYWLRDYRVPQRTKLVLFYFSPCHQCQTYYVECEPRCLVPWVPLWSSLEDIERLLFEDRRLMAYYALTIKSAQYTLMMVAVIQVFWGLYVKGWLHRHFPWMFSDQW

SEQ ID NO: 136 - protein, 178 aa, Artificial Sequence
  Synthetic Construct
MPELSLTLFDEPPPLVETEPLPPLSDVSEYRVEYSEARCVLRSGGRLEALWTLRGNLSVPTPTPRVYYQTLEGYADRVPTPVEDVSESLVAKRYWLRDYRVPQRTKLVLFYFSPCHQCQTYYVECEPRCLVPWVPLWSSLEDIERLLFEDRRLMAYYALTIKSAQYHRHFPWMFSDQW

SEQ ID NO: 137 - protein, 742 aa, Human cytomegalovirus
MRPGLPSYLIVLAVCLLSHLLSPRYGAEAVSEPLDKAFHLLLNTYGRPIRFLRENATQCTYNSSLRNSTVVRENAISFNFFQSYNQYYVFHMPRCLFAGPLAEQFLNQVDLTETLERYQQRLNTYALVSKDLASYRSFSQQLKAQDSLGEQPTTVPPPIDLSIPHVWMPPQTTPHGWTESHTTSGLHRPHFNQTCILFDGHDLLFSTVTPCLHQGFYLIDELRYVKITLTEDFFVVTVSIDDDTPMLLIFGHLPRVLFKAPYQRDNFILRQTEKHELLVLVKKDQLNRHSYLKDPDFLDAALDFNYLDLSALLRNSFHRYAVDVLKSGRCQMLDRRTVEMAFAYALALFAAARQEEAGAQVSVPRALDRQAALLQIQEFMITCLSQTPPRTTLLLYPTAVDLAKRALWTPNQITDITSLVRLVYILSKQNQQHLIPQWALRQIADFALKLHKTHLASFLSAFARQELYLMGSLVHSMLVHTTERREIFIVETGLCSLAELSHFTQLLAHPHHEYLSDLYTPCSSSGRRDHSLERLTRLFPDATVPTTVPTALSILSTMQPSTLETFPDLFCLPLGESFSALTVSEHVSYVVTNQYLIKGISYPVSTTVVGQSLIITQTDSQSKCELTRNMHTTHSITAALNISLENCAFCQSALLEYDDTQGVINIMYMHDSDDVLFALDPYNEVVVSSPRTHYLMLLKNGTVLEVTDVVVDATDSRLLMMSVYALSAIIGIYLLYRMLKTC

SEQ ID NO: 138 - protein, 694 aa, Human cytomegalovirus
VSEPLDKAFHLLLNTYGRPIRFLRENATQCTYNSSLRNSTVVRENAISFNFFQSYNQYYVFHMPRCLFAGPLAEQFLNQVDLTETLERYQQRLNTYALVSKDLASYRSFSQQLKAQDSLGEQPTTVPPPIDLSIPHVWMPPQTTPHGWTESHTTSGLHRPHFNQTCILFDGHDLLFSTVTPCLHQGFYLIDELRYVKITLTEDFFVVTVSIDDDTPMLLIFGHLPRVLFKAPYQRDNFILRQTEKHELLVLVKKDQLNRHSYLKDPDFLDAALDFNYLDLSALLRNSFHRYAVDVLKSGRCQMLDRRTVEMAFAYALALFAAARQEEAGAQVSVPRALDRQAALLQIQEFMITCLSQTPPRTTLLLYPTAVDLAKRALWTPNQITDITSLVRLVYILSKQNQQHLIPQWALRQIADFALKLHKTHLASFLSAFARQELYLMGSLVHSMLVHTTERREIFIVETGLCSLAELSHFTQLLAHPHHEYLSDLYTPCSSSGRRDHSLERLTRLFPDATVPTTVPTALSILSTMQPSTLETFPDLFCLPLGESFSALTVSEHVSYVVTNQYLIKGISYPVSTTVVGQSLIITQTDSQSKCELTRNMHTTHSITAALNISLENCAFCQSALLEYDDTQGVINIMYMHDSDDVLFALDPYNEVVVSSPRTHYLMLLKNGTVLEVTDVVVDATDSRRMLKTC

SEQ ID NO: 139 - protein, 120 aa, Artificial Sequence
  Synthetic Construct
TYNSSLRNSTVVRENAISFNFFQSYNQYYVFHMPRGPGPGDLTETLERYQQRLNTYALVSKDLASYRSFSGPGPGSHTTSGLHRPHFNQTCILFDGPGPGQLNRHSYLKDPDFLDAALDF

SEQ ID NO: 140 - protein, 120 aa, Artificial Sequence
  Synthetic Construct
TYNSSLRNSTVVRENAISFNFFQSYNQYYVFHMPRPMGLPDLTETLERYQQRLNTYALVSKDLASYRSFSPMGLPSHTTSGLHRPHFNQTCILFDPMGLPQLNRHSYLKDPDFLDAALDF

SEQ ID NO: 141 - protein, 579 aa, Human cytomegalovirus
  Strain Towne
MESSAKRKMDPDNPDEGPSSKVPRPETPVTKATTFLQTMLRKEVNSQLSLGDPLFPELAEESLKTFERVTEDCNENPEKDVLAELGDILAQAVNHAGIDSSSTGPTLTTHSCSVSSAPLNKPTPTSVAVTNTPLPGASATPELSPRKKPRKTTRPFKVIIKPPVPPAPIMLPLIKQEDIKPEPDFTIQYRNKIIDTAGCIVISDSEEEQGEEVETRGATASSPSTGSGTPRVTSPTHPLSQMNHPPLPDPLGRPDEDSSSSSSSCSSASDSESESEEMKCSSGGGASVTSSHHGRGGFGGAASSSLLSCGHQSSGGASTGPRKKKSKRISELDNEKVRNIMKDKNTPFCTPNVQTRRGRVKIDEVSRMFRNTNRSLEYKNLPFTIPSMHQVLDEAIKACKTMQVNNKGIQIIYTRNHEVKSEVDAVRCRLGTMCNLALSTPFLMEHTMPVTHPPEVAQRTADACNEGVKAAWSLKELHTHQLCPRSSDYRNMIIHAATPVDLLGALNLCLPLMQKFPKQVMVRIFSTNQGGFMLPIYETAAKAYAVGQFEQPTETPPEDLDTLSLAIEAAIQDLRNKSQ

SEQ ID NO: 142 - protein, 60 aa, Artificial Sequence
  Synthetic Construct
RRGRVKIDEVSRMFRGPGPGGIQIIYTRNHEVKSEGPGPGLSTPFLMEHTMPVTHPPEVA

SEQ ID NO: 143 - protein, 60 aa, Artificial Sequence
  Synthetic Construct
RRGRVKIDEVSRMFRPMGLPGIQIIYTRNHEVKSEPMGLPLSTPFLMEHTMPVTHPPEVA

SEQ ID NO: 144 - protein, 1132 aa, Homo sapiens
MPRAPRCRAVRSLLRSHYREVLPLATFVRRLGPQGWRLVQRGDPAAFRALVAQCLVCVPWDARPPPAAPSFRQVSCLKELVARVLQRLCERGAKNVLAFGFALLDGARGGPPEAFTTSVRSYLPNTVTDALRGSGAWGLLLRRVGDDVLVHLLARCALFVLVAPSCAYQVCGPPLYQLGAATQARPPPHASGPRRRLGCERAWNHSVREAGVPLGLPAPGARRRGGSASRSLPLPKRPRRGAAPEPERTPVGQGSWAHPGRTRGPSDRGFCVVSPARPAEEATSLEGALSGTRHSHPSVGRQHHAGPPSTSRPPRPWDTPCPPVYAETKHFLYSSGDKEQLRPSFLLSSLRPSLTGARRLVETIFLGSRPWMPGTPRRLPRLPQRYWQMRPLFLELLGNHAQCPYGVLLKTHCPLRAAVTPAAGVCAREKPQGSVAAPEEEDTDPRRLVQLLRQHSSPWQVYGFVRACLRRLVPPGLWGSRHNERRFLRNTKKFISLGKHAKLSLQELTWKMSVRDCAWLRRSPGVGCVPAAEHRLREEILAKFLHWLMSVYVVELLRSFFYVTETTFQKNRLFFYRKSVWSKLQSIGIRQHLKRVQLRELSEAEVRQHREARPALLTSRLRFIPKPDGLRPIVNMDYVVGARTFRREKRAERLTSRVKALFSVLNYERARRPGLLGASVLGLDDIHRAWRTFVLRVRAQDPPPELYFVKVDVTGAYDTIPQDRLTEVIASIIKPQNTYCVRRYAVVQKAAHGHVRKAFKSHVSTLTDLQPYMRQFVAHLQETSPLRDAVVIEQSSSLNEASSGLFDVFLRFMCHHAVRIRGKSYVQCQGIPQGSILSTLLCSLCYGDMENKLFAGIRRDGLLLRLVDDFLLVTPHLTHAKTFLRTLVRGVPEYGCVVNLRKTVVNFPVEDEALGGTAFVQMPAHGLFPWCGLLLDTRTLEVQSDYSSYARTSIRASLTFNRGFKAGRNMRRKLFGVLRLKCHSLFLDLQVNSLQTVCTNIYKILLLQAYRFHACVLQLPFHQQVWKNPTFFLRVISDTASLCYSILKAKNAGMSLGAKGAAGPLPSEAVQWLCHQAFLLKLTRHRVTYVPLLGSLRTAQTQLSRKLPGTTLTALEAAANPALPSDFKTILD

SEQ ID NO: 145 - protein, 965 aa, Homo sapiens
YQVCGPPLYQLGAATQARPPPHASGPRRRLGCERAWNHSVREAGVPLGLPAPGARRRGGSASRSLPLPKRPRRGAAPEPERTPVGQGSWAHPGRTRGPSDRGFCVVSPARPAEEATSLEGALSGTRHSHPSVGRQHHAGPPSTSRPPRPWDTPCPPVYAETKHFLYSSGDKEQLRPSFLLSSLRPSLTGARRLVETIFLGSRPWMPGTPRRLPRLPQRYWQMRPLFLELLGNHAQCPYGVLLKTHCPLRAAVTPAAGVCAREKPQGSVAAPEEEDTDPRRLVQLLRQHSSPWQVYGFVRACLRRLVPPGLWGSRHNERRFLRNTKKFISLGKHAKLSLQELTWKMSVRDCAWLRRSPGVGCVPAAEHRLREEILAKFLHWLMSVYVVELLRSFFYVTETTFQKNRLFFYRKSVWSKLQSIGIRQHLKRVQLRELSEAEVRQHREARPALLTSRLRFIPKPDGLRPIVNMDYVVGARTFRREKRAERLTSRVKALFSVLNYERARRPGLLGASVLGLDDIHRAWRTFVLRVRAQDPPPELYFVKVDVTGAYDTIPQDRLTEVIASIIKPQNTYCVRRYAVVQKAAHGHVRKAFKSHVSTLTDLQPYMRQFVAHLQETSPLRDAVVIEQSSSLNEASSGLFDVFLRFMCHHAVRIRGKSYVQCQGIPQGSILSTLLCSLCYGDMENKLFAGIRRDGLLLRLVDDFLLVTPHLTHAKTFLRTLVRGVPEYGCVVNLRKTVVNFPVEDEALGGTAFVQMPAHGLFPWCGLLLDTRTLEVQSDYSSYARTSIRASLTFNRGFKAGRNMRRKLFGVLRLKCHSLFLDLQVNSLQTVCTNIYKILLLQAYRFHACVLQLPFHQQVWKNPTFFLRVISDTASLCYSILKAKNAGMSLGAKGAAGPLPSEAVQWLCHQAFLLKLTRHRVTYVPLLGSLRTAQTQLSRKLPGTTLTALEAAANPALPSDFKTILD

SEQ ID NO: 146 - protein, 1065 aa, Homo sapiens
MPRAPRCRAVRSLLRSHYREVLPLATFVRRLGPQGWRLVQRGDPAAFRALVAQCLVCVPWDARPPPAAPSFRQVSCLKELVARVLQRLCERGAKNVLAFGFALLDGARGGPPEAFTTSVRSYLPNTVTDALRGSGAWGLLLRRVGDDGPPLYQLGAATQARPPPHASGPRRRLGCERAWNHSVREAGVPLGLPAPGARRRGGSASRSLPLPKRPRRGAAPEPERTPVGQGSWAHPGRTRGPSDRGFCVVSPARPAEEATSLEGALSGTRHSHPSVGRQHHAGPPSTSRPPRPWDTPCPPVYAETKHFLYSSGDKEQLRPSFLLSSLRPSLTGARRLVETIFLGSRPWMPGTPRRLPRLPQRYWQMRPLFLELLGNHAQCPYGVLLKTHCPLRAAVTPAAGVCAREKPQGSVAAPEEEDTDPRRLVQLLRQHSSPWQVYGFVRACLRRLVPPGLWGSRHNERRFLRNTKKFISLGKHAKLSLQELTWKMSVRDCAWLRRSPGVGCVPAAEHRLREEILAKFLHWLMSVYVVELLRSFFYVTETTFQKNRLFFYRKSVWSKLQSIGIRQHLKRVQLRELSEAEVRQHREARPALLTSRLRFIPKPDGLRPIVNMDYVVGARTFRREKRAERLTSRVKALFSVLNYERARRPGLLGASVLGLDDIHRAWRTFVLRVRAQDPPPELYFVKVAITGAYDTIPQDRLTEVIASIIKPQNTYCVRRYAVVQKAAHGHVRKAFKSHVSTLTDLQPYMRQFVAHLQETSPLRDAVVIEQSSSLNEASSGLFDVFLRFMCHHAVRIRGKSYVQENKLFAGIRRDGLLLRLVDDFLLVTPHLTHAKTFLRTLVRGVPEYGCVVNLRKTVVNFPVEDEALDTRTLEVQSDYSSYARTSIRASLTFNRGFKAGRNMRRKLFGVLRLKCHSLFLDLQVNSLQTVCTNIYKILLLQAYRFHACVLQLPFHQQVWKNPTFFLRVISDTASLCYSILKAKNAGMSLGAKGAAGPLPSEAVQWLCHQAFLLKLTRHRVTYVPLLGSLRTAQTQLSRKLPGTTLTALEAAANPALPSDFKTILD

SEQ ID NO: 147 - protein, 142 aa, Pongo abelii
MGAPTLPPAWQPFLKDHRISTFKNWPFLEGCACTPERMAEAGFIHCPTENEPDLAQCFFCFKELEGWEPDDDPIEEHKKHSSGCAFLSVKKQFEELTLGEFLKLDRERAKNKIAKETNNKKKEFEETAKKVRRAIEQLAAMD

SEQ ID NO: 148 - protein, 452 aa, Clostridium tetani
MKNLDCWVDNEEDIDVILKKSTILNLDINNDIISDISGFNSSVITYPDAQLVPGINGKAIHLVNNESSEVIVHKAMDIEYNDMFNNFTVSFWLRVPKVSASHLEQYGTNEYSIISSMKKHSLSIGSGWSVSLKGNNLIWTLKDSAGEVRQITFRDLPDKFNAYLANKWVFITITNDRLSSANLYINGVLMGSAEITGLGAIREDNNITLKLDRCNNNNQYVSIDKFRIFCKALNPKEIEKLYTSYLSITFLRDFWGNPLRYDTEYYLIPVASSSKDVQLKNITDYMYLTNAPSYTNGKLNIYYRRLYNGLKFIIKRYTPNNEIDSFVKSGDFIKLYVSYNNNEHIVGYPKDGNAFNNLDRILRVGYNAPGIPLYKKMEAVKLRDLKTYSVQLKLYDDKNASLGLVGTHNGQIGNDPNRDILIASNWYFNHLKDKILGCDWYFVPTDEGWTND

SEQ ID NO: 149 - protein, 111 aa, Artificial Sequence
  Synthetic Construct
PGINGKAIHLVNNESSEGPGPGFNNFTVSFWLRVPKVSASHLEQYGTGPGPGYVSIDKFRIFCKALNPKEIEKLYTSYLSGPGPGILRVGYNAPGIPLYKKMEAVKLRDLK

SEQ ID NO: 150 - protein, 111 aa, Artificial Sequence
  Synthetic Construct
PGINGKAIHLVNNESSEPMGLPFNNFTVSFWLRVPKVSASHLEQYGTPMGLPYVSIDKFRIFCKALNPKEIEKLYTSYLSPMGLPILRVGYNAPGIPLYKKMEAVKLRDLK

SEQ ID NO: 151 - protein, 180 aa, Homo sapiens
MQAEGRGTGGSTGDADGPGGPGIPDGPGGNAGGPGEAGATGGRGPRGAGAARASGPGGGAPRGPHGGAASGLNGCCRCGARGPESRLLEFYLAMPFATPMEAELARRSLAQDAPPLPVPGVLLKEFTVSGNILTIRLTAADHRQLQLSISSCLQQLSLLMWITQCFLPVFLAQPPSGQRR

SEQ ID NO: 152 - protein, 1255 aa, Homo sapiens
MELAALCRWGLLLALLPPGAASTQVCTGTDMKLRLPASPETHLDMLRHLYQGCQVVQGNLELTYLPTNASLSFLQDIQEVQGYVLIAHNQVRQVPLQRLRIVRGTQLFEDNYALAVLDNGDPLNNTTPVTGASPGGLRELQLRSLTEILKGGVLIQRNPQLCYQDTILWKDIFHKNNQLALTLIDTNRSRACHPCSPMCKGSRCWGESSEDCQSLTRTVCAGGCARCKGPLPTDCCHEQCAAGCTGPKHSDCLACLHFNHSGICELHCPALVTYNTDTFESMPNPEGRYTFGASCVTACPYNYLSTDVGSCTLVCPLHNQEVTAEDGTQRCEKCSKPCARVCYGLGMEHLREVRAVTSANIQEFAGCKKIFGSLAFLPESFDGDPASNTAPLQPEQLQVFETLEEITGYLYISAWPDSLPDLSVFQNLQVIRGRILHNGAYSLTLQGLGISWLGLRSLRELGSGLALIHHNTHLCFVHTVPWDQLFRNPHQALLHTANRPEDECVGEGLACHQLCARGHCWGPGPTQCVNCSQFLRGQECVEECRVLQGLPREYVNARHCLPCHPECQPQNGSVTCFGPEADQCVACAHYKDPPFCVARCPSGVKPDLSYMPIWKFPDEEGACQPCPINCTHSCVDLDDKGCPAEQRASPLTSIVSAVVGILLVVVLGVVFGILIKRRQQKIRKYTMRRLLQETELVEPLTPSGAMPNQAQMRILKETELRKVKVLGSGAFGTVYKGIWIPDGENVKIPVAIKVLRENTSPKANKEILDEAYVMAGVGSPYVSRLLGICLTSTVQLVTQLMPYGCLLDHVRENRGRLGSQDLLNWCMQIAKGMSYLEDVRLVHRDLAARNVLVKSPNHVKITDFGLARLLDIDETEYHADGGKVPIKWMALESILRRRFTHQSDVWSYGVTVWELMTFGAKPYDGIPAREIPDLLEKGERLPQPPICTIDVYMIMVKCWMIDSECRPRFRELVSEFSRMARDPQRFVVIQNEDLGPASPLDSTFYRSLLEDDDMGDLVDAEEYLVPQQGFFCPDPAPGAGGMVHHRHRSSSTRSGGGDLTLGLEPSEEEAPRSPLAPSEGAGSDVFDGDLGMGAAKGLQSLPTHDPSPLQRYSEDPTVPLPSETDGYVAPLTCSPQPEYVNQPDVRPQPPSPREGPLPAARPAGATLERAKTLSPGKNGVVKDVFAFGGAVENPEYLTPQGGAAPQPHPPPAFSPAFDNLYYWDQDPPERGAPPSTFKGTPTAENPEYLGLDVPV

SEQ ID NO: 153 - protein, 1196 aa, Artificial Sequence
  Synthetic Construct
TQVCTGTDMKLRLPASPETHLDMLRHLYQGCQVVQGNLELTYLPTNASLSFLQDIQEVQGYVLIAHNQVRQVPLQRLRIVRGTQLFEDNYALAVLDNGDPLNNTTPVTGASPGGLRELQLRSLTEILKGGVLIQRNPQLCYQDTILWKDIFHKNNQLALTLIDTNRSRACHPCSPMCKGSRCWGESSEDCQSLTRTVCAGGCARCKGPLPTDCCHEQCAAGCTGPKHSDCLACLHFNHSGICELHCPALVTYNTDTFESMPNPEGRYTFGASCVTACPYNYLSTDVGSCTLVCPLHNQEVTAEDGTQRCEKCSKPCARVCYGLGMEHLREVRAVTSANIQEFAGCKKIFGSLAFLPESFDGDPASNTAPLQPEQLQVFETLEEITGYLYISAWPDSLPDLSVFQNLQVIRGRILHNGAYSLTLQGLGISWLGLRSLRELGSGLALIHHNTHLCFVHTVPWDQLFRNPHQALLHTANRPEDECVGEGLACHQLCARGHCWGPGPTQCVNCSQFLRGQECVEECRVLQGLPREYVNARHCLPCHPECQPQNGSVTCFGPEADQCVACAHYKDPPFCVARCPSGVKPDLSYMPIWKFPDEEGACQPCPINCTHSCVDLDDKGCPAEQRASPLTLLQETELVEPLTPSGAMPNQAQMRILKETELRKVKVLGSGAFGTVYKGIWIPDGENVKIPVAIAVLRENTSPKANKEILDEAYVMAGVGSPYVSRLLGICLTSTVQLVTQLMPYGCLLDHVRENRGRLGSQDLLNWCMQIAKGMSYLEDVRLVHRDLAARNVLVKSPNHVKITDFGLARLLDIDETEYHADGGKVPIKWMALESILRRRFTHQSDVWSYGVTVWELMTFGAKPYDGIPAREIPDLLEKGERLPQPPICTIDVYMIMVKCWMIDSECRPRFRELVSEFSRMARDPQRFVVIQNEDLGPASPLDSTFYRSLLEDDDMGDLVDAEEYLVPQQGFFCPDPAPGAGGMVHHRHRSSSTRSGGGDLTLGLEPSEEEAPRSPLAPSEGAGSDVFDGDLGMGAAKGLQSLPTHDPSPLQRYSEDPTVPLPSETDGYVAPLTCSPQPEYVNQPDVRPQPPSPREGPLPAARPAGATLERAKTLSPGKNGVVKDVFAFGGAVENPEYLTPQGGAAPQPHPPPAFSPAFDNLYYWDQDPPERGAPPSTFKGTPTAENPEYLGLDVPV

SEQ ID NO: 154 - protein, 610 aa, Artificial Sequence
  Synthetic Construct
TQVCTGTDMKLRLPASPETHLDMLRHLYQGCQVVQGNLELTYLPTNASLSFLQDIQEVQGYVLIAHNQVRQVPLQRLRIVRGTQLFEDNYALAVLDNGDPLNNTTPVTGASPGGLRELQLRSLTEILKGGVLIQRNPQLCYQDTILWKDIFHKNNQLALTLIDTNRSRACHPCSPMCKGSRCWGESSEDCQSLTRTVCAGGCARCKGPLPTDCCHEQCAAGCTGPKHSDCLACLHFNHSGICELHCPALVTYNTDTFESMPNPEGRYTFGASCVTACPYNYLSTDVGSCTLVCPLHNQEVTAEDGTQRCEKCSKPCARVCYGLGMEHLREVRAVTSANIQEFAGCKKIFGSLAFLPESFDGDPASNTAPLQPEQLQVFETLEEITGYLYISAWPDSLPDLSVFQNLQVIRGRILHNGAYSLTLQGLGISWLGLRSLRELGSGLALIHHNTHLCFVHTVPWDQLFRNPHQALLHTANRPEDECVGEGLACHQLCARGHCWGPGPTQCVNCSQFLRGQECVEECRVLQGLPREYVNARHCLPCHPECQPQNGSVTCFGPEADQCVACAHYKDPPFCVARCPSGVKPDLSYMPIWKFPDEEGACQPCPINCTH

SEQ ID NO: 155 - protein, 1342 aa, Homo sapiens
MRANDALQVLGLLFSLARGSEVGNSQAVCPGTLNGLSVTGDAENQYQTLYKLYERCEVVMGNLEIVLTGHNADLSFLQWIREVTGYVLVAMNEFSTLPLPNLRVVRGTQVYDGKFAIFVMLNYNTNSSHALRQLRLTQLTEILSGGVYIEKNDKLCHMDTIDWRDIVRDRDAEIVVKDNGRSCPPCHEVCKGRCWGPGSEDCQTLTKTICAPQCNGHCFGPNPNQCCHDECAGGCSGPQDTDCFACRHFNDSGACVPRCPQPLVYNKLTFQLEPNPHTKYQYGGVCVASCPHNFVVDQTSCVRACPPDKMEVDKNGLKMCEPCGGLCPKACEGTGSGSRFQTVDSSNIDGFVNCTKILGNLDFLITGLNGDPWHKIPALDPEKLNVFRTVREITGYLNIQSWPPHMHNFSVFSNLTTIGGRSLYNRGFSLLIMKNLNVTSLGFRSLKEISAGRIYISANRQLCYHHSLNWTKVLRGPTEERLDIKHNRPRRDCVAEGKVCDPLCSSGGCWGPGPGQCLSCRNYSRGGVCVTHCNFLNGEPREFAHEAECFSCHPECQPMEGTATCNGSGSDTCAQCAHFRDGPHCVSSCPHGVLGAKGPIYKYPDVQNECRPCHENCTQGCKGPELQDCLGQTLVLIGKTHLTMALTVIAGLVVIFMMLGGTFLYWRGRRIQNKRAMRRYLERGESIEPLDPSEKANKVLARIFKETELRKLKVLGSGVFGTVHKGVWIPEGESIKIPVCIKVIEDKSGRQSFQAVTDHMLAIGSLDHAHIVRLLGLCPGSSLQLVTQYLPLGSLLDHVRQHRGALGPQLLLNWGVQIAKGMYYLEEHGMVHRNLAARNVLLKSPSQVQVADFGVADLLPPDDKQLLYSEAKTPIKWMALESIHFGKYTHQSDVWSYGVTVWELMTFGAEPYAGLRLAEVPDLLEKGERLAQPQICTIDVYMVMVKCWMIDENIRPTFKELANEFTRMARDPPRYLVIKRESGPGIAPGPEPHGLTNKKLEEVELEPELDLDLDLEAEEDNLATTTLGSALSLPVGTLNRPRGSQSLLSPSSGYMPMNQGNLGESCQESAVSGSSERCPRPVSLHPMPRGCLASESSEGHVTGSEAELQEKVSMCRSRSRSRSPRPRGDSAYHSQRHSLLTPVTPLSPPGLEEEDVNGYVMPDTHLKGTPSSREGTLSSVGLSSVLGTEEEDEDEEYEYMNRRRRHSPPHPPRPSSLEELGYEYMDVGSDLSASLGSTQSCPLHPVPIMPTAGTTPDEDYEYMNRQRDGGGPGGDYAAMGACPASEQGYEEMRAFQGPGHQAPHVHYARLKTLRSLEATDSAFDNPDYWHSRLFPKANAQRT

SEQ ID NO: 156 - protein, 1295 aa, Artificial Sequence
  Synthetic Construct
SEVGNSQAVCPGTLNGLSVTGDAENQYQTLYKLYERCEVVMGNLEIVLTGHNADLSFLQWIREVTGYVLVAMNEFSTLPLPNLRVVRGTQVYDGKFAIFVMLNYNTNSSHALRQLRLTQLTEILSGGVYIEKNDKLCHMDTIDWRDIVRDRDAEIVVKDNGRSCPPCHEVCKGRCWGPGSEDCQTLTKTICAPQCNGHCFGPNPNQCCHDECAGGCSGPQDTDCFACRHFNDSGACVPRCPQPLVYNKLTFQLEPNPHTKYQYGGVCVASCPHNFVVDQTSCVRACPPDKMEVDKNGLKMCEPCGGLCPKACEGTGSGSRFQTVDSSNIDGFVNCTKILGNLDFLITGLNGDPWHKIPALDPEKLNVFRTVREITGYLNIQSWPPHMHNFSVFSNLTTIGGRSLYNRGFSLLIMKNLNVTSLGFRSLKEISAGRIYISANRQLCYHHSLNWTKVLRGPTEERLDIKHNRPRRDCVAEGKVCDPLCSSGGCWGPGPGQCLSCRNYSRGGVCVTHCNFLNGEPREFAHEAECFSCHPECQPMEGTATCNGSGSDTCAQCAHFRDGPHCVSSCPHGVLGAKGPIYKYPDVQNECRPCHENCTQGCKGPELQDCLGQTLVLIGKTHLTYWRGRRIQNKRAMRRYLERGESIEPLDPSEKANKVLARIFKETELRKLKVLGSGVFGTVHKGVWIPEGESIKIPVCIKVIEDKSGRQSFQAVTDHMLAIGSLDHAHIVRLLGLCPGSSLQLVTQYLPLGSLLDHVRQHRGALGPQLLLNWGVQIAKGMYYLEEHGMVHRNLAARNVLLKSPSQVQVADFGVADLLPPDDKQLLESEAKTPIKWMALESIHFGKYTHQSDVWSYGVTVWELMTFGAEPYAGLRLAEVPDLLEKGERLAQPQICTIDVYMVMVKCWMIDENIRPTFKELANEFTRMARDPPRYLVIKRESGPGIAPGPEPHGLTNKKLEEVELEPELDLDLDLEAEEDNLATTTLGSALSLPVGTLNRPRGSQSLLSPSSGYMPMNQGNLGESCQESAVSGSSERCPRPVSLHPMPRGCLASESSEGHVTGSEAELQEKVSMCRSRSRSRSPRPRGDSAYHSQRHSLLTPVTPLSPPGLEEEDVNGYVMPDTHLKGTPSSREGTLSSVGLSSVLGTEEEDEDEEYEYMNPHPPRPSSLEELGYEYMDVGSDLSASLGSTQSCPLHPVPIMPTAGTTPDEDYEYMNRQRDGGGPGGDYAAMGACPASEQGYEEMRAFQGPGHQAPHVHYARLKTLRSLEATDSAFDNPDYWHSRLFPKANAQRT

SEQ ID NO: 157 - protein, 624 aa, Artificial Sequence
  Synthetic Construct
SEVGNSQAVCPGTLNGLSVTGDAENQYQTLYKLYERCEVVMGNLEIVLTGHNADLSFLQWIREVTGYVLVAMNEFSTLPLPNLRVVRGTQVYDGKFAIFVMLNYNTNSSHALRQLRLTQLTEILSGGVYIEKNDKLCHMDTIDWRDIVRDRDAEIVVKDNGRSCPPCHEVCKGRCWGPGSEDCQTLTKTICAPQCNGHCFGPNPNQCCHDECAGGCSGPQDTDCFACRHFNDSGACVPRCPQPLVYNKLTFQLEPNPHTKYQYGGVCVASCPHNFVVDQTSCVRACPPDKMEVDKNGLKMCEPCGGLCPKACEGTGSGSRFQTVDSSNIDGFVNCTKILGNLDFLITGLNGDPWHKIPALDPEKLNVFRTVREITGYLNIQSWPPHMHNFSVFSNLTTIGGRSLYNRGFSLLIMKNLNVTSLGFRSLKEISAGRIYISANRQLCYHHSLNWTKVLRGPTEERLDIKHNRPRRDCVAEGKVCDPLCSSGGCWGPGPGQCLSCRNYSRGGVCVTHCNFLNGEPREFAHEAECFSCHPECQPMEGTATCNGSGSDTCAQCAHFRDGPHCVSSCPHGVLGAKGPIYKYPDVQNECRPCHENCTQGCKGPELQDCLGQTLVLIGKTHLT

SEQ ID NO: 158 - protein, 283 aa, Homo sapiens
MEPPGDWGPPPWRSTPKTDVLRLVLYLTFLGAPCYAPALPSCKEDEYPVGSECCPKCSPGYRVKEACGELTGTVCEPCPPGTYIAHLNGLSKCLQCQMCDPAMGLRASRNCSRTENAVCGCSPGHFCIVQDGDHCAACRAYATSSPGQRVQKGGTESQDTLCQNCPPGTFSPNGTLEECQHQTKCSWLVTKAGAGTSSSHWVWWFLSGSLVIVIVCSTVGLIICVKRRKPRGDVVKVIVSVQRKRQEAEGEATVIEALQAPPDVTTVAVEETIPSFTGRSPNH

SEQ ID NO: 159 - protein, 164 aa, Artificial Sequence [sequence omitted]

SEQ ID NO: 160 - protein, 150 aa, Human papillomavirus type 16
MHQKRTAMFQDPQESGRKLPQLCTELQTTIHDIILECVYCKQQLLRREVYDRDLCIVYRDGNPYAVCDKCLKFYSKISEYRHYCYSLYGTTLEQQYNKPLCDLLIRCINCQKPLQRHLDKKQRFHNIRGRWTGRCMSCCRSSRTRRETQL

SEQ ID NO: 161 - protein, 150 aa, Human papillomavirus type 18
MARFEDPTRSGYKLPDLCTELNTSLQDIEITCVYCKTVLELTEVFEKDLFVVYRDSIPHAACHKCIDFYSRIRELRHYSDSVYGDTLEKLTNTGLYNLLIRCLRCQKPLLRHLNEKRRFHNIAGHYRGQCHSCCNRARQERLQRRRETQV

SEQ ID NO: 162 - protein, 98 aa, Human papillomavirus type 16
MHGDTPTLHEYMLDLQPETTDLYGYGQLNDSSEEEDEIDGPAGQAEPDRAHYNIVTFCCKCDSTLRLCVQSTHVDIRTLEDLLMGTLGIVCPICSQKP

SEQ ID NO: 163 - protein, 105 aa, Human papillomavirus type 18
MHGPKATLQDIVLHLEPQNEIPVDLLGHGQLSDSEEENDEIDGVNHQHLPARRAEPQRHTMLCMCCKCEARIELVVESSADDLRAFQQLFLNTLSFVCPWCASQQ

SEQ ID NO: 164 - protein, 253 aa, Artificial Sequence
  Synthetic Construct
MHQKRTAMFQDPQESGRKLPQLCTELQTTIHDIILECVYCKQQLLRREVYDRDLCIVYRDGNPYAVCDKCLKFYSKISEYRHYCYSLYGTTLEQQYNKPLCDLLIRCINCQKPLQRHLDKKQRFHNIRGRWTGRCMSCCRSSRTRRETQLGPGPGMHGDTPTLHEYMLDLQPETTDLYGYGQLNDSSEEEDEIDGPAGQAEPDRAHYNIVTFCCKCDSTLRLCVQSTHVDIRTLEDLLMGTLGIVCPICSQKP

SEQ ID NO: 165 - protein, 260 aa, Artificial Sequence
  Synthetic Construct
MARFEDPTRSGYKLPDLCTELNTSLQDIEITCVYCKTVLELTEVFEKDLFVVYRDSIPHAACHKCIDFYSRIRELRHYSDSVYGDTLEKLTNTGLYNLLIRCLRCQKPLLRHLNEKRRFHNIAGHYRGQCHSCCNRARQERLQRRRETQVGPGPGMHGPKATLQDIVLHLEPQNEIPVDLLGHGQLSDSEEENDEIDGVNHQHLPARRAEPQRHTMLCMCCKCEARIELVVESSADDLRAFQQLFLNTLSFVCPWCASQQ

SEQ ID NO: 166 - protein, 518 aa, Artificial Sequence
  Synthetic Construct
MHQKRTAMFQDPQESGRKLPQLCTELQTTIHDIILECVYCKQQLLRREVYDRDLCIVYRDGNPYAVCDKCLKFYSKISEYRHYCYSLYGTTLEQQYNKPLCDLLIRCINCQKPLQRHLDKKQRFHNIRGRWTGRCMSCCRSSRTRRETQLGPGPGMARFEDPTRSGYKLPDLCTELNTSLQDIEITCVYCKTVLELTEVFEKDLFVVYRDSIPHAACHKCIDFYSRIRELRHYSDSVYGDTLEKLTNTGLYNLLIRCLRCQKPLLRHLNEKRRFHNIAGHYRGQCHSCCNRARQERLQRRRETQVGPGPGMHGDTPTLHEYMLDLQPETTDLYGYGQLNDSSEEEDEIDGPAGQAEPDRAHYNIVTFCCKCDSTLRLCVQSTHVDIRTLEDLLMGTLGIVCPICSQKPGPGPGMHGPKATLQDIVLHLEPQNEIPVDLLGHGQLSDSEEENDEIDGVNHQHLPARRAEPQRHTMLCMCCKCEARIELVVESSADDLRAFQQLFLNTLSFVCPWCASQQ

SEQ ID NO: 167 - protein, 158 aa, Homo sapiens
MQAEGRGTGGSTGDADGPGGPGIPDGPGGNAGGPGEAGATGGRGPRGAGAARASGPGGGAPRGPHGGAASGLNGCCRCGARGPESRLLEFYLAMPFATPMEAELARRSLAQDAPPLPVPGVLLKEFTVSGNILTIRLTAADHRQLQLSISSCLQQQRR

SEQ ID NO: 168 - protein, 79 aa, Homo sapiens
ARGPESRLLEFYLAMPFATPMEAELARRSLAQDAPPLPVPGVLLKEFTVSGNILTIRLTAADHRQLQLSISSCLQQQRR

SEQ ID NO: 169 - protein, 641 aa, Human gammaherpesvirus 4
MSDEGPGTGPGNGLGEKGDTSGPEGSGGSGPQRRGGDNHGRGRGRGRGRGGGRPGAPGGSGSGPRHRDGVRRPQKRPSCIGCKGTHGGTGAGAGAGGAGAGGAGAGGGAGAGGGAGGAGGAGGAGAGGGAGAGGGAGGAGGAGAGGGAGAGGGAGGAGAGGGAGGAGGAGAGGGAGAGGGAGGAGAGGGAGGAGGAGAGGGAGAGGAGGAGGAGAGGAGAGGGAGGAGGAGAGGAGAGGAGAGGAGAGGAGGAGAGGAGGAGAGGAGGAGAGGGAGGAGAGGGAGGAGAGGAGGAGAGGAGGAGAGGAGGAGAGGGAGAGGAGAGGGGRGRGGSGGRGRGGSGGRGRGGSGGRRGRGRERARGGSRERARGRGRGRGEKRPRSPSSQSSSSGSPPRRPPPGRRPFFHPVGEADYFEYHQEGGPDGEPDVPPGAIEQGPADDPGEGPSTGPRGQGDGGRRKKGGWFGKHRGQGGSNPKFENIAEGLRALLARSHVERTTDEGTWVAGVFVYGGSKTSLYNLRRGTALAIPQCRLTPLSRLPFGMAPGPGPQPGPLRESIVCYFMVFLQTHIFAEVLKDAIKDLVMTKPAPTCNIRVTVCSFDDGVDLPPWFPPMVEGAAAEGDDGDDGDEGGDGDEGEEGQE

SEQ ID NO: 170 - protein, 391 aa, Human gammaherpesvirus 4
MSDEGPGTGPGNGLGEKGDTSGPEGSGGSGPQRRGGDNHGRGRGRGRGRGGGRPGAPGGSGSGPRHRDGVRRPQKRPSCIGCKGTHRGRGGSGGRGRGGSGGRRGRGRERARGGSRERARGRGRGRGEKRPRSPSSQSSSSGSPPRRPPPGRRPFFHPVGEADYFEYHQEGGPDGEPDVPPGAIEQGPADDPGEGPSTGPRGQGDGGRRKKGGWFGKHRGQGGSNPKFENIAEGLRALLARSHVERTTDEGTWVAGVFVYGGSKTSLYNLRRGTALAIPQCRLTPLSRLPFGMAPGPGPQPGPLRESIVCYFMVFLQTHIFAEVLKDAIKDLVMTKPAPTCNIRVTVCSFDDGVDLPPWFPPMVEGAAAEGDDGDDGDEGGDGDEGEEGQE

SEQ ID NO: 171 - protein, 860 aa, Human gammaherpesvirus 4
MEAALLVCQYTIQSLIHLTGEDPGFFNVEIPEFPFYPTCNVCTADVNVTINFDVGGKKHQLDLDFGQLTPHTKAVYQPRGAFGGSENATNLFLLELLGAGELALTMRSKKLPINVTTGEEQQVSLESVDVYFQDVFGTMWCHHAEMQNPVYLIPETVPYIKWDNCNSTNITAVVRAQGLDVTLPLSLPTSAQDSNFSVKTEMLGNEIDIECIMEDGEISQVLPGDNKFNITCSGYESHVPSGGILTSTSPVATPIPGTGYAYSLRLTPRPVSRFLGNNSILYVFYSGNGPKASGGDYCIQSNIVFSDEIPASQDMPTNTTDITYVGDNATYSVPMVTSEDANSPNVTVTAFWAWPNNTETDFKCKWTLTSGTPSGCENISGAFASNRTFDITVSGLGTAPKTLIITRTATNATTTTHKVIFSKAPESTTTSPTLNTTGFADPNTTTGLPSSTHVPTNLTAPASTGPTVSTADVTSPTPAGTTSGASPVTPSPSPWDNGTESKAPDMTSSTSPVTTPTPNATSPTPAVTTPTPNATSPTPAVTTPTPNATSPTLGKTSPTSAVTTPTPNATSPTLGKTSPTSAVTTPTPNATSPTLGKTSPTSAVTTPTPNATGPTVGETSPQANATNHTLGGTSPTPVVTSQPKNATSAVTTGQHNITSSSTSSMSLRPSSNPETLSPSTSDNSTSHMPLLTSAHPTGGENITQVTPASISTHHVSTSSPAPRPGTTSQASGPGNSSTSTKPGEVNVTKGTPPQNATSPQAPSGQKTAVPTVTSTGGKANSTTGGKHTTGHGARTSTEPTTDYGGDSTTPRPRYNATTYLPPSTSSKLRPRWTFTSPPVTTAQATVPVPPTSQPRFSNLS

SEQ ID NO: 172 - protein, 497 aa, Human gammaherpesvirus 4
MGSLEMVPMGAGPPSPGGDPDGYDGGNNSQYPSASGSSGNTPTPPNDEERESNEEPPPPYEDPYWGNGDRHSDYQPLGTQDQSLYLGLQHDGNDGLPPPPYSPRDDSSQHIYEEAGRGSMNPVCLPVIVAPYLFWLAAIAASCFTASVSTVVTATGLALSLLLLAAVASSYAAAQRKLLTPVTVLTAVVTFFAICLTWRIEDPPFNSLLFALLAAAGGLQGIYVLVMLVLLILAYRRRWRRLTVCGGIMFLACVLVLIVDAVLQLSPLLGAVTVVSMTLLLLAFVLWLSSPGGLGTLGAALLTLAAALALLASLILGTLNLTTMFLLMLLWTLVVLLICSSCSSCPLSKILLARLFLYALALLLLASALIAGGSILQTNFKSLSSTEFIPNLFCMLLLIVAGILFILAILTEWGSGNRTYGPVFMCLGGLLTMVAGAVWLTVMSNTLLSAWILTAGFLIFLIGFALFGVIRCCRYCCYYCLTLESEERPPTPYRNTV

SEQ ID NO: 173 - protein, 540 aa, Homo sapiens
AQPPPPPPDATCHQVRSFFQRLQPGLKWVPETPVPGSDLQVCLPKGPTCCSRKMEEKYQLTARLNMEQLLQSASMELKFLIIQNAAVFQEAFEIVVRHAKNYTNAMFKNNYPSLTPQAFEFVGEFFTDVSLYILGSDINVDDMVNELFDSLFPVIYTQLMNPGLPDSALDINECLRGARRDLKVFGNFPKLIMTQVSKSLQVTRIFLQALNLGIEVINTTDHLKFSKDCGRMLTRMWYCSYCQGLMMVKPCGGYCNVVMQGCMAGVVEIDKYWREYILSLEELVNGMYRIYDMENVLLGLFSTIHDSIQYVQKNAGKLTTTIGKLCAHSQQRQYRSAYYPEDLFIDKKVLKVAHVEHEETLSSRRRELIQKLKSFISFYSALPGYICSHSPVAENDTLCWNGQELVERYSQKAARNGMKNQFNLHELKMKGPEPVVSQIIDKLKHINQLLRTMSMPKGRVLDKNLDEEGFESGDCGDDEDECIGGSGDGMIKVKNQLRFLAELAYDLDVDDAPGNSQQATPKDNEISTFHNLGNVHSPLK

SEQ ID NO: 174 - protein, 192 aa, Hepatitis B virus
  SITE (192)..(192): Xaa can be any naturally occurring amino acid
MQWNSTTFHQTLQDPRVRGLYFPAGGSSSGTVNPVLTTASPLSSIFSRIGDPALNMENITSGTIPQSLDSWWTSLNFLGGTTVCLGQNSQSPTSNHSPTSCPPTCPGYRWMCLRRDYQGMLPVCPLIPGSSTTSTGPCRTCMTTAQGTSMYPSCCCTKPSDGNCTCIPIPSSWAFGKFLWEWASARYWGPSX

SEQ ID NO: 175 - protein, 120 aa, Hepatitis B virus
MAARLCCQLDPARDVLCLRPVGAESRGRPLSGPLGALPSPSPSAVPADHGAHLSLRGLPVCAFSSAGPCALRFTSARRMETTVNAHQILPKVLHKRTFGLSAMSTTDLEAYFKDCVFKDW

SEQ ID NO: 176 - protein, 120 aa, Homo sapiens
MMTGTIETTGNISAEKGGSIILQCHLSSTTAQVTQVNWEQQDQLLAICNADLGWHISPSFKDRVAPGPGLGLTLQSLTVNDTGEYFCIYHTYPDGTYTGRIFLEVLESSVAEHGARFQIP

SEQ ID NO: 177 - protein, 289 aa, Homo sapiens [sequence omitted]

SEQ ID NO: 178 - protein, 719 aa, Homo sapiens
QDPWAAEPRAACGPSSCYALFPRRRTFLEAWRACRELGGDLATPRTPEEAQRVDSLVGAGPASRLLWIGLQRQARQCQLQRPLRGFTWTTGDQDTAFTNWAQPASGGPCPAQRCVALEASGEHRWLEGSCTLAVDGYLCQFGFEGACPALQDEAGQAGPAVYTTPFHLVSTEFEWLPFGSVAAVQCQAGRGASLLCVKQPEGGVGWSRAGPLCLGTGCSPDNGGCEHECVEEVDGHVSCRCTEGFRLAADGRSCEDPCAQAPCEQQCEPGGPQGYSCHCRLGFRPAEDDPHRCVDTDECQIAGVCQQMCVNYVGGFECYCSEGHELEADGISCSPAGAMGAQASQDLGDELLDDGEDEEDEDEAWKAFNGGWTEMPGILWMEPTQPPDFALAYRPSFPEDREPQIPYPEPTWPPPLSAPRVPYHSSVLSVTRPVVVSATHPTLPSAHQPPVIPATHPALSRDHQIPVIAANYPDLPSAYQPGILSVSHSAQPPAHQPPMISTKYPELFPAHQSPMFPDTRVAGTQTTTHLPGIPPNHAPLVTTLGAQLPPQAPDALVLRTQATQLPIIPTAQPSLTTTSRSPVSPAHQISVPAATQPAALPTLLPSQSPTNQTSPISPTHPHSKAPQIPREDGPSPKLALWLPSPAPTAAPTALGEAGLAEHSQRDDRWLYCTRCGPHAPNKRITDCYRWVIHAGSKSPTEPMPPRGSLTGVQTCRTSV

SEQ ID NO: 179 - protein, 653 aa, Artificial Sequence
  Synthetic Construct
TQVCTGTDMKLRLPASPETHLDMLRHLYQGCQVVQGNLELTYLPTNASLSFLQDIQEVQGYVLIAHNQVRQVPLQRLRIVRGTQLFEDNYALAVLDNGDPLNNTTPVTGASPGGLRELQLRSLTEILKGGVLIQRNPQLCYQDTILWKDIFHKNNQLALTLIDTNRSRACHPCSPMCKGSRCWGESSEDCQSLTRTVCAGGCARCKGPLPTDCCHEQCAAGCTGPKHSDCLACLHFNHSGICELHCPALVTYNTDTFESMPNPEGRYTFGASCVTACPYNYLSTDVGSCTLVCPLHNQEVTAEDGTQRCEKCSKPCARVCYGLGMEHLREVRAVTSANIQEFAGCKKIFGSLAFLPESFDGDPASNTAPLQPEQLQVFETLEEITGYLYISAWPDSLPDLSVFQNLQVIRGRILHNGAYSLTLQGLGISWLGLRSLRELGSGLALIHHNTHLCFVHTVPWDQLFRNPHQALLHTANRPEDECVGEGLACHQLCARGHCWGPGPTQCVNCSQFLRGQECVEECRVLQGLPREYVNARHCLPCHPECQPQNGSVTCFGPEADQCVACAHYKDPPFCVARCPSGVKPDLSYMPIWKFPDEEGACQPCPINCTHSCVDLDDKGCPAEQRASPLTSIVSAVVGILLVVVLGVVFGILI

SEQ ID NO: 180 - protein, 651 aa, Homo sapiens
KLTIESTPFNVAEGKEVLLLVHNLPQHLFGYSWYKGERVDGNRQIIGYVIGTQQATPGPAYSGREIIYPNASLLIQNIIQNDTGFYTLHVIKSDLVNEEATGQFRVYPELPKPSISSNNSKPVEDKDAVAFTCEPETQDATYLWWVNNQSLPVSPRLQLSNGNRTLTLFNVTRNDTASYKCETQNPVSARRSDSVILNVLYGPDAPTISPLNTSYRSGENLNLSCHAASNPPAQYSWFVNGTFQQSTQELFIPNITVNNSGSYTCQAHNSDTGLNRTTVTTITVYAEPPKPFITSNNSNPVEDEDAVALTCEPEIQNTTYLWWVNNQSLPVSPRLQLSNDNRTLTLLSVTRNDVGPYECGIQNKLSVDHSDPVILNVLYGPDDPTISPSYTYYRPGVNLSLSCHAASNPPAQYSWLIDGNIQQHTQELFISNITEKNSGLYTCQANNSASGHSRTTVKTITVSAELPKPSISSNNSKPVEDKDAVAFTCEPEAQNTTYLWWVNGQSLPVSPRLQLSNGNRTLTLFNVTRNDARAYVCGIQNSVSANRSDPVTLDVLYGPDTPIISPPDSSYLSGANLNLSCHSASNPSPQYSWRINGIPQQHTQVLFIAKITPNNNGTYACFVSNLATGRNNSIVKSITVSASGTSPGLSA

SEQ ID NO: 181 - protein, 76 aa, Homo sapiens
MKTNDTYMKFSWLTVPEKSLDKEHRCIVRHENNKNGVDQEIIFPPIKTDVITMDPKDNCSKDANDTLLLQLTNTSA

SEQ ID NO: 182 - protein, 324 aa, Homo sapiens
MVQRLWVSRLLRHRKAQLPPLLLEVGVEEKSASDHWRGRYGRRRPLAGLLCPDPRPTPLEALLSDLFRDPDHCRQADWDTSALAPYLGTQEECEEAALGPTEPAEGLSAPSLSPHCCPCRARLAFRNLGALLPRLHQLCCRMPRTLRRLVGEGLYQGVPRAEPGTEARRHYDEGVRRLVQRFGTRASVAVVTASYHREKQVFLPKYRGDTGGASSEDSLMTSFLPGPKPGAPFPNGHVGAGGSGLLPPPPALCGASACDVSVRVVVGEPTEARVVPGRGICLDLAILDSAFLLSQVAPSLFMGSIVQLSQSVTFDKSDLAKYSA

SEQ ID NO: 183 - protein, 729 aa, Homo sapiens
MWNLLHETDSAVATARRPRWLCKSSNEATNITPKHNMKAFLDELKAENIKKFLYNFTQIPHLAGTEQNFQLAKQIQSQWKEFGLDSVELAHYDVLLSYPNKTHPNYISIINEDGNEIFNTSLFEPPPPGYENVSDIVPPFSAFSPQGMPEGDLVYVNYARTEDFFKLERDMKINCSGKIVIARYGKVFRGNKVKNAQLAGAKGVILYSDPADYFAPGVKSYPDGWNLPGGGVQRGNILNLNGAGDPLTPGYPANEYAYRRGIAEAVGLPSIPVHPIGYYDAQKLLEKMGGSAPPDSSWRGSLKVPYNVGPGFTGNFSTQKVKMHIHSTNEVTRIYNVIGTLRGAVEPDRYVILGGHRDSWVFGGIDPQSGAAVVHEIVRSFGTLKKEGWRPRRTILFASWDAEEFGLLGSTEWAEENSRLLQERGVAYINADSSIEGNYTLRVDCTPLMYSLVHNLTKELKSPDEGFEGKSLYESWTKKSPSPEFSGMPRISKLGSGNDFEVFFQRLGIASGRARYTKNWETNKFSGYPLYHSVYETYELVEKFYDPMFKYHLTVAQVRGGMVFELANSIVLPFDCRDYAVVLRKYADKIYSISMKHPQEMKTYSVSFDSLFSAVKNFTEIASKFSERLQDFDKSNPIVLRMMNDQLMFLERAFIDPLGLPDRPFYRHVIYAPSSHNKYAGESFPGIYDALFDIESKVDPSKAWGEVKRQIYVAAFTVQAAAETLSEVA

SEQ ID NO: 184 - protein, 165 aa, Homo sapiens
MGAPTLPPAWQPFLKDHRISTFKNWPFLEGCACTPERMAEAGFIHCPTENEPDLAQCFFCFKELEGWEPDDDPIGPGTVAYACNTSTLGGRGGRITREEHKKHSSGCAFLSVKKQFEELTLGEFLKLDRERAKNKIAKETNNKKKEFEETAKKVRRAIEQLAAMD

SEQ ID NO: 185 - protein, 1137 aa, Homo sapiens
TGSGHASSTPGGEKETSATQRSSVPSSTEKNAVSMTSSVLSSHSPGSGSSTTQGQDVTLAPATEPASGSAATWGQDVTSVPVTRPALGSTTPPAHDVTSAPDNKPAPGSTAPPAHGVTSAPDTRPAPGSTAPPAHGVTSAPDTRPAPGSTAPPAHGVTSAPDTRPAPGSTAPPAHGVTSAPDTRPAPGSTAPPAHGVTSAPDTRPAPGSTAPPAHGVTSAPDTRPAPGSTAPPAHGVTSAPDTRPAPGSTAPPAHGVTSAPDTRPAPGSTAPPAHGVTSAPDTRPAPGSTAPPAHGVTSAPDTRPAPGSTAPPAHGVTSAPDTRPAPGSTAPPAHGVTSAPDTRPAPGSTAPPAHGVTSAPDTRPAPGSTAPPAHGVTSAPDTRPAPGSTAPPAHGVTSAPDTRPAPGSTAPPAHGVTSAPDTRPAPGSTAPPAHGVTSAPDTRPAPGSTAPPAHGVTSAPDTRPAPGSTAPPAHGVTSAPDTRPAPGSTAPPAHGVTSAPDTRPAPGSTAPPAHGVTSAPDTRPAPGSTAPPAHGVTSAPDTRPAPGSTAPPAHGVTSAPDTRPAPGSTAPPAHGVTSAPDTRPAPGSTAPPAHGVTSAPDTRPAPGSTAPPAHGVTSAPDTRPAPGSTAPPAHGVTSAPDTRPAPGSTAPPAHGVTSAPDTRPAPGSTAPPAHGVTSAPDTRPAPGSTAPPAHGVTSAPDTRPAPGSTAPPAHGVTSAPDTRPAPGSTAPPAHGVTSAPDTRPAPGSTAPPAHGVTSAPDTRPAPGSTAPPAHGVTSAPDTRPAPGSTAPPAHGVTSAPDTRPAPGSTAPPAHGVTSAPDTRPAPGSTAPPAHGVTSAPDTRPAPGSTAPPAHGVTSAPDTRPAPGSTAPPAHGVTSAPDTRPAPGSTAPPAHGVTSAPDTRPAPGSTAPPAHGVTSAPDNRPALGSTAPPVHNVTSASGSASGSASTLVHNGTSARATTTPASKSTPFSIPSHHSDTPTTLASHSTKTDASSTHHSSVPPLTSSNHSTSPQLSTGVSFFFLSFHISNLQFNSSLEDPSTDYYQELQRDISEMFLQIYKQGGFLGLSNIKFRPGSVVVQLTLAFREGTINVHDVETQFNQYKTEAASRYNLTISDVSVSDVPFPFSAQSGAGVPG

SEQ ID NO: 186 - protein, 252 aa, Homo sapiens
TGSGHASSTPGGEKETSATQRSSVPSSTEKNALSTGVSFFFLSFHISNLQFNSSLEDPSTDYYQELQRDISEMFLQIYKQGGFLGLSNIKFRPGSVVVQLTLAFREGTINVHDVETQFNQYKTEAASRYNLTISDVSVSDVPFPFSAQSGAGVPGWGIALLVLVCVLVALAIVYLIALAVCQCRRKNYGQLDIFPARDTYHPMSEYPTYHTHGRYVPPSSTDRSPYEKVSAGNGGSSLSYTNPAVAATSANL

SEQ ID NO: 187 - protein, 241 aa, Homo sapiens
MKIFMYLLTVFLITQMIGSALFAVYLHRRLDKIEDERNLHEDFVFMKTIQRCNTGERSLSLLNCEEIKSQFEGFVKDIMLNKEETKKENSFEMQKGDQNPQIAAHVISEASSKTTSVLQWAEKGYYTMSNNLVTLENGKQLTVKRQGLYYIYAQVTFCSNREASSQAPFIASLCLKSPGRFERILLRAANTHSSAKPCGQQSIHLGGVFELQPGASVFVNVTDPSQVSHGTGFTSFGLLKL

SEQ ID NO: 188 - protein, 449 aa, Homo sapiens
MGSDVRDLNALLPAVPSLGGGGGCALPVSGAAQWAPVLDFAPPGASAYGSLGGPAPPPAPPPPPPPPPHSFIKQEPSWGGAEPHEEQCLSAFTVHFSGQFTGTAGACRYGPFGPPPPSQASSGQARMFPNAPYLPSCLESQPAIRNQGYSTVTFDGTPSYGHTPSHHAAQFPNHSFKHEDPMGQQGSLGEQQYSVPPPVYGCHTPTDSCTGSQALLLRTPYSSDNLYQMTSQLECMTWNQMNLGATLKGVAAGSSSSVKWTEGQSNHSTGYESDNHTTPILCGAQYRIHTHGVFRGIQDVRRVPGVAPTLVRSASETSEKRPFMCAYPGCNKRYFKLSHLQMHSRKHTGEKPYQCDFKDCERRFSRSDQLKRHQRRHTGVKPFQCKTCQRKFSRSDHLKTHTRTHTGKTSEKPFSCRWPSCQKKFARSDELVRHHNMHQRNMTKLQLAL

SEQ ID NO: 189 - protein, 322 aa, Homo sapiens
MGSDVRDLNALLPAVPSLGGGGGCALPVSGAAQWAPVLDFAPPGASAYGSLGGPAPPPAPPPPPPPPPHSFIKQEPSWGGAEPHEEQCLSAFTVHFSGQFTGTAGACRYGPFGPPPPSQASSGQARMFPNAPYLPSCLESQPAIRNQGYSTVTFDGTPSYGHTPSHHAAQFPNHSFKHEDPMGQQGSLGEQQYSVPPPVYGCHTPTDSCTGSQALLLRTPYSSDNLYQMTSQLECMTWNQMNLGATLKGVAAGSSSSVKWTEGQSNHSTGYESDNHTTPILCGAQYRIHTHGVFRGIQDVRRVPGVAPTLVRSASETSEKRP

SEQ ID NO: 190 - protein, 509 aa, Homo sapiens
MERRRLWGSIQSRYISMSVWTSPRRLVELAGQSLLKDEALAIAALELLPRELFPPLFMAAFDGRHSQTLKAMVQAWPFTCLPLGVLMKGQHLHLETFKAVLDGLDVLLAQEVRPRRWKLQVLDLRKNSHQDFWTVWSGNRASLYSFPEPEAAQPMTKKRKVDGLSTEAEQPFIPVEVLVDLFLKEGACDELFSYLIEKVKRKKNVLRLCCKKLKIFAMPMQDIKMILKMVQLDSIEDLEVTCTWKLPTLAKFSPYLGQMINLRRLLLSHIHASSYISPEKEEQYIAQFTSQFLSLQCLQALYVDSLFFLRGRLDQLLRHVMNPLETLSITNCRLSEGDVMHLSQSPSVSQLSVLSLSGVMLTDVSPEPLQALLERASATLQDLVFDECGITDDQLLALLPSLSHCSQLTTLSFYGNSISISALQSLLQHLIGLSNLTHVLYPVPLESYEDIHGTLHLERLAYLHARLRELLCELGRPSMVWLSANPCPHCGDRTFYDPEPILCPCFMPN

SEQ ID NO: 191 - protein, 210 aa, Homo sapiens
MQAEGQGTGGSTGDADGPGGPGIPDGPGGNAGGPGEAGATGGRGPRGAGAARASGPRGGAPRGPHGGAASAQDGRCPCGARRPDSRLLQLHITMPFSSPMEAELVRRILSRDAAPLPRPGAVLKDFTVSGNLLFMSVRDQDREGAGRMRVVGWGLGSASPEGQKARDLRTPKHKVSEQRPGTPGPPPPEGAQGDGCRGVAFNVMFSAPHI

SEQ ID NO: 192 - protein, 314 aa, Homo sapiens
MPLEQRSQHCKPEEGLEARGEALGLVGAQAPATEEQEAASSSSTLVEVTLGEVPAAESPDPPQSPQGASSLPTTMNYPLWSQSYEDSSNQEEEGPSTFPDLESEFQAALSRKVAELVHFLLLKYRAREPVTKAEMLGSVVGNWQYFFPVIFSKASSSLQLVFGIELMEVDPIGHLYIFATCLGLSYDGLLGDNQIMPKAGLLIIVLAIIAREGDCAPEEKIWEELSVLEVFEGREDSILGDPKKLLTQHFVQENYLEYRQVPGSDPACYEFLWGPRALVETSYVKVLHHMVKISGGPHISYPPLHEWVLREGEE

SEQ ID NO: 193 - protein, 562 aa, Artificial Sequence
  Synthetic Construct
MAPRSARRPLLLLLLLLLLGLMHCASAAMFMVKNGNGTACIMANFSAAFSVNYDTKSGPKNMTLDLPSDATVVLNRSSCGKENTSDPSLVIAFGRGHTLTLNFTRNATRYSVQLMSFVYNLSDTHLFPNASSKEIKTVESITDIRADIDKKYRCVSGTQVHMNNVTVTLHDATIQAYLSNSSFSRGETRCEQDRPSPTTAPPAPPSPSPSPVPKSPSVDKYNVSGTNGTCLLASMGLQLNLTYERKDNTTVTRLLNINPNKTSASGSCGAHLVTLELHSEGTTVLLFQFGMNASSSRFFLQGIQLNTILPDARDPAFKAANGSLRALQATVGNSYKCNAEEHVRVTKAFSVNIFKVWVQAFKVEGGQFGSVEECLLDENSLEMGAPTLPPAWQPFLKDHRISTFKNWPFLEGCACTPERMAEAGFIHCPTENEPDLAQCFFCFKELEGWEPDDDPIEEHKKHSSGCAFLSVKKQFEELTLGEFLKLDRERAKNKIAKETNNKKKEFEETAKKVRRAIEQLAAMDEFTLIPIAVGGALAGLVLIVLIAYLVGRKRSHAGYQTI

SEQ ID NO: 194 - protein, 558 aa, Artificial Sequence
  Synthetic Construct
MAPRSARRPLLLLLLLLLLGLMHCASAMGAPTLPPAWQPFLKDHRISTFKNWPFLEGCACTPERMAEAGFIHCPTENEPDLAQCFFCFKELEGWEPDDDPIEEHKKHSSGCAFLSVKKQFEELTLGEFLKLDRERAKNKIAKETNNKKKEFEETAKKVRRAIEQLAAMDAMFMVKNGNGTACIMANFSAAFSVNYDTKSGPKNMTLDLPSDATVVLNRSSCGKENTSDPSLVIAFGRGHTLTLNFTRNATRYSVQLMSFVYNLSDTHLFPNASSKEIKTVESITDIRADIDKKYRCVSGTQVHMNNVTVTLHDATIQAYLSNSSFSRGETRCEQDRPSPTTAPPAPPSPSPSPVPKSPSVDKYNVSGTNGTCLLASMGLQLNLTYERKDNTTVTRLLNINPNKTSASGSCGAHLVTLELHSEGTTVLLFQFGMNASSSRFFLQGIQLNTILPDARDPAFKAANGSLRALQATVGNSYKCNAEEHVRVTKAFSVNIFKVWVQAFKVEGGQFGSVEECLLDENSMLIPIAVGGALAGLVLIVLIAYLVGRKRSHAGYQTI

SEQ ID NO: 195 - protein, 370 aa, Artificial Sequence
  Synthetic Construct
MAPRSARRPLLLLLLLLLLGLMHCASAMGAPTLPPAWQPFLKDHRISTFKNWPFLEGCACTPERMAEAGFIHCPTENEPDLAQCFFCFKELEGWEPDDDPIEEHKKHSSGCAFLSVKKQFEELTLGEFLKLDRERAKNKIAKETNNKKKEFEETAKKVRRAIEQLAAMDAMFMVKNGNGTACIMANFSAAFSVNYDTKSGPKNMTLDLPSDATVVLNRSSCGKENTSDPSLVIAFGRGHTLTLNFTRNATRYSVQLMSFVYNLSDTHLFPNASSKEIKTVESITDIRADIDKKYRCVSGTQVHMNNVTVTLHDATIQAYLSNSSFSRGETRCEQDLIPIAVGGALAGLVLIVLIAYLVGRKRSHAGYQTI

SEQ ID NO: 196 - protein, 375 aa, Artificial Sequence
  Synthetic Construct
MAPRSARRPLLLLLLLLLLGLMHCASAAMFMVKNGNGTACIMANFSAAFSVNYDTKSGPKNMTLDLPSDATVVLNRSSCGKENTSDPSLVIAFGRGHTLTLNFTRNATRYSVQLMSFVYNLSDTHLFPNASSKEIKTVESITDIRADIDKKYRCVSGTQVHMNNVTVTLHDATIQAYLSNSSFSRGETRCEQDLEMGAPTLPPAWQPFLKDHRISTFKNWPFLEGCACTPERMAEAGFIHCPTENEPDLAQCFFCFKELEGWEPDDDPIEEHKKHSSGCAFLSVKKQFEELTLGEFLKLDRERAKNKIAKETNNKKKEFEETAKKVRRAIEQLAAMDEFTLIPIAVGGALAGLVLIVLIAYLVGRKRSHAGYQTI

SEQ ID NO: 197 - protein, 527 aa, Artificial Sequence
  Synthetic Construct
MAPRSARRPLLLLLLLLLLGLMHCASAAMFMVKNGNGTACIMANFSAAFSVNYDTKSGPKNMTLDLPSDATVVLNRSSCGKENTSDPSLVIAFGRGHTLTLNFTRNATRYSVQLMSFVYNLSDTHLFPNASSKEIKTVESITDIRADIDKKYRCVSGTQVHMNNVTVTLHDATIQAYLSNSSFSRGETRCEQDLEMGAPTLPPAWQPFLKDHRISTFKNWPFLEGCACTPERMAEAGFIHCPTENEPDLAQCFFCFKELEGWEPDDDPIEEHKKHSSGCAFLSVKKQFEELTLGEFLKLDRERAKNKIAKETNNKKKEFEETAKKVRRAIEQLAAMDEFTCLLASMGLQLNLTYERKDNTTVTRLLNINPNKTSASGSCGAHLVTLELHSEGTTVLLFQFGMNASSSRFFLQGIQLNTILPDARDPAFKAANGSLRALQATVGNSYKCNAEEHVRVTKAFSVNIFKVWVQAFKVEGGQFGSVEECLLDENSMLIPIAVGGALAGLVLIVLIAYLVGRKRSHAGYQTI

SEQ ID NO: 198 - protein, 365 aa, Artificial Sequence
  1A01_HLA-A/m__Homo_sapiens__P30443
MAVMAPRTLLLLLSGALALTQTWAGSHSMRYFFTSVSRPGRGEPRFIAVGYVDDTQFVRFDSDAASQKMEPRAPWIEQEGPEYWDQETRNMKAHSQTDRANLGTLRGYYNQSEDGSHTIQIMYGCDVGPDGRFLRGYRQDAYDGKDYIALNEDLRSWTAADMAAQITKRKWEAVHAAEQRRVYLEGRCVDGLRRYLENGKETLQRTDPPKTHMTHHPISDHEATLRCWALGFYPAEITLTWQRDGEDQTQDTELVETRPAGDGTFQKWAAVVVPSGEEQRYTCHVQHEGLPKPLTLRWELSSQPTIPIVGIIAGLVLLGAVITGAVVAAVMWRRKSSDRKGGSYTQAASSDSAQGSDVSLTACKV

SEQ ID NO: 199 - protein, 365 aa, Artificial Sequence [sequence omitted]

SEQ ID NO: 200 - protein, 420 aa, Artificial Sequence
  5T4__Homo_sapiens__Q13641
MPGGCSRGPAAGDGRLRLARLALVLLGWVSSSSPTSSASSFSSSAPFLASAVSAQPPLPDQCPALCECSEAARTVKCVNRNLTEVPTDLPAYVRNLFLTGNQLAVLPAGAFARRPPLAELAALNLSGSRLDEVRAGAFEHLPSLRQLDLSHNPLADLSPFAFSGSNASVSAPSPLVELILNHIVPPEDERQNRSFEGMVVAALLAGRALQGLRRLELASNHFLYLPRDVLAQLPSLRHLDLSNNSLVSLTYVSFRNLTHLESLHLEDNALKVLHNGTLAELQGLPHIRVFLDNNPWVCDCHMADMVTWLKETEVVQGKDRLTCAYPEKMRNRVLLELNSADLDCDPILPPSLQTSYVFLGIVLALIGAIFLLVLYLNRKGIKKWMHNIRDACRDHMEGYHYRYEINADPRLTNLSSNSDV

SEQ ID NO: 201 - protein, 543 aa, Artificial Sequence
  ACRBP__Homo_sapiens__Q8NEB7
MRKPAAGFLPSLLKVLLLPLAPAAAQDSTQASTPGSPLSPTEYERFFALLTPTWKAETTCRLRATHGCRNPTLVQLDQYENHGLVPDGAVCSNLPYASWFESFCQFTHYRCSNHVYYAKRVLCSQPVSILSPNTLKEIEASAEVSPTTMTSPISPHFTVTERQTFQPWPERLSNNVEELLQSSLSLGGQEQAPEHKQEQGVEHRQEPTQEHKQEEGQKQEEQEEEQEEEGKQEEGQGTKEGREAVSQLQTDSEPKFHSESLSSNPSSFAPRVREVESTPMIMENIQELIRSAQEIDEMNEIYDENSYWRNQNPGSLLQLPHTEALLVLCYSIVENTCIITPTAKAWKYMEEEILGFGKSVCDSLGRRHMSTCALCDFCSLKLEQCHSEASLQRQQCDTSHKTPFVSPLLASQSLSIGNQVGSPESGRFYGLDLYGGLHMDFWCARLATKGCEDVRVSGWLQTEFLSFQDGDFPTKICDTDYIQYPNYCSFKSQQCLMRNRNRKVSRMRCLQNETYSALSPGKSEDVVLRWSQEFSTLTLGQFG

SEQ ID NO: 202 - protein, 609 aa, Artificial Sequence
  AFP__Homo_sapiens__P02771
MKWVESIFLIFLLNFTESRTLHRNEYGIASILDSYQCTAEISLADLATIFFAQFVQEATYKEVSKMVKDALTAIEKPTGDEQSSGCLENQLPAFLEELCHEKEILEKYGHSDCCSQSEEGRHNCFLAHKKPTPASIPLFQVPEPVTSCEAYEEDRETFMNKFIYEIARRHPFLYAPTILLWAARYDKIIPSCCKAENAVECFQTKAATVTKELRESSLLNQHACAVMKNFGTRTFQAITVTKLSQKFTKVNFTEIQKLVLDVAHVHEHCCRGDVLDCLQDGEKIMSYICSQQDTLSNKITECCKLTTLERGQCIIHAENDEKPEGLSPNLNRFLGDRDFNQFSSGEKNIFLASFVHEYSRRHPQLAVSVILRVAKGYQELLEKCFQTENPLECQDKGEEELQKYIQESQALAKRSCGLFQKLGEYYLQNAFLVAYTKKAPQLTSSELMAITRKMAATAATCCQLSEDKLLACGEGAADIIIGHLCIRHEMTPVNPGVGQCCTSSYANRRPCFSSLVVDETYVPPAFSDDKFIFHKDLCQAQGVALQTMKQEFLINLVKQKPQITEEQLEAVIADFSGLLEKCCQGQEQEVCFAEEGQKLISKTRAALGV

SEQ ID NO: 203 - protein, 854 aa, Artificial Sequence
  AKAP4__Homo_sapiens__Q5JQC9
MMAYSDTTMMSDDIDWLRSHRGVCKVDLYNPEGQQDQDRKVICFVDVSTLNVEDKDYKDAASSSSEGNLNLGSLEEKEIIVIKDTEKKDQSKTEGSVCLFKQAPSDPVSVLNWLLSDLQKYALGFQHALSPSTSTCKHKVGDTEGEYHRASSENCYSVYADQVNIDYLMNRPQNLRLEMTAAKNTNNNQSPSAPPAKPPSTQRAVISPDGECSIDDLSFYVNRLSSLVIQMAHKEIKEKLEGKSKCLHHSICPSPGNKERISPRTPASKIASEMAYEAVELTAAEMRGTGEESREGGQKSFLYSELSNKSKSGDKQMSQRESKEFADSISKGLMVYANQVASDMMVSLMKTLKVHSSGKPIPASVVLKRVLLRHTKEIVSDLIDSCMKNLHNITGVLMTDSDFVSAVKRNLFNQWKQNATDIMEAMLKRLVSALIGEEKETKSQSLSYASLKAGSHDPKCRNQSLEFSTMKAEMKERDKGKMKSDPCKSLTSAEKVGEHILKEGLTIWNQKQGNSCKVATKACSNKDEKGEKINASTDSLAKDLIVSALKLIQYHLTQQTKGKDTCEEDCPGSTMGYMAQSTQYEKCGGGQSAKALSVKQLESHRAPGPSTCQKENQHLDSQKMDMSNIVLMLIQKLLNENPFKCEDPCEGENKCSEPRASKAASMSNRSDKAEEQCQEHQELDCTSGMKQANGQFIDKLVESVMKLCLIMAKYSNDGAALAELEEQAASANKPNFRGTRCIHSGAMPQNYQDSLGHEVIVNNQCSTNSLQKQLQAVLQWIAASQFNVPMLYFMGDKDGQLEKLPQVSAKAAEKGYSVGGLLQEVMKFAKERQPDEAVGKVARKQLLDWLLANL

SEQ ID NO: 204 - protein, 416 aa, Artificial Sequence
  alpha-actinin-_4/m__Homo_sapiens__B4DSX0
MVDYHAANQSYQYGPSSAGNGAGGGGSMGDYMAQEDDWDRDLLLDPAWEKQQRKTFTAWCNSHLRKAGTQIENIDEDFRDGLKLMLLLEVISGERLPKPERGKMRVHKINNVNKALDFIASKGVKLVSIGAEEIVDGNAKMTLGMIWTIILRFAIQDISVEETSAKEGLLLWCQRKTAPYKNVNVQNFHISWKDGLAFNALIHRHRPELIEYDKLRKDDPVTNLNNAFEVAEKYLDIPKMLDAEDIVNTARPDEKAIMTYVSSFYHAFSGAQKAETAANRICKVLAVNQENEHLMEDYEKLASDLLEWIRRTIPWLEDRVPQKTIQEMQQKLEDFRDYRRVHKPPKVQEKCQLEINFNTLQTKLRLSNRPAFMPSWRSRASSSPTSTCAASSPARPMLWGPGSRPRWRRSGASPLR

SEQ ID NO: 205 - protein, 562 aa, Artificial Sequence [sequence omitted]

SEQ ID NO: 206 - protein, 911 aa, Artificial Sequence
  alpha-actinin-_4/m__Homo_sapiens__O43707
MVDYHAANQSYQYGPSSAGNGAGGGGSMGDYMAQEDDWDRDLLLDPAWEKQQRKTFTAWCNSHLRKAGTQIENIDEDFRDGLKLMLLLEVISGERLPKPERGKMRVHKINNVNKALDFIASKGVKLVSIGAEEIVDGNAKMTLGMIWTIILRFAIQDISVEETSAKEGLLLWCQRKTAPYKNVNVQNFHISWKDGLAFNALIHRHRPELIEYDKLRKDDPVTNLNNAFEVAEKYLDIPKMLDAEDIVNTARPDEKAIMTYVSSFYHAFSGAQKAETAANRICKVLAVNQENEHLMEDYEKLASDLLEWIRRTIPWLEDRVPQKTIQEMQQKLEDFRDYRRVHKPPKVQEKCQLEINFNTLQTKLRLSNRPAFMPSEGKMVSDINNGWQHLEQAEKGYEEWLLNEIRRLERLDHLAEKFRQKASIHEAWTDGKEAMLKHRDYETATLSDIKALIRKHEAFESDLAAHQDRVEQIAAIAQELNELDYYDSHNVNTRCQKICDQWDALGSLTHSRREALEKTEKQLEAIDQLHLEYAKRAAPFNNWMESAMEDLQDMFIVHTIEEIEGLISAHDQFKSTLPDADREREAILAIHKEAQRIAESNHIKLSGSNPYTTVTPQIINSKWEKVQQLVPKRDHALLEEQSKQQSNEHLRRQFASQANVVGPWIQTKMEEIGRISIEMNGTLEDQLSHLKQYERSIVDYKPNLDLLEQQHQLIQEALIFDNKHTNYTMEHIRVGWEQLLTTIARTINEVENQILTRDAKGISQEQMQEFRASFNHFDKDHGGALGPEEFKACLISLGYDVENDRQGEAEFNRIMSLVDPNHSGLVTFQAFIDFMSRETTDTDTADQVIASFKVLAGDKNFITAEELRRELPPDQAEYCIARMAPYQGPDAVPGALDYKSFSTALYGESDL

SEQ ID NO: 207 - protein, 198 aa, Artificial Sequence [sequence omitted]

SEQ ID NO: 208 - protein, 198 aa, Artificial Sequence [sequence omitted]

SEQ ID NO: 209 - protein, 920 aa, Artificial Sequence
  ANDR__Homo_sapiens__P10275
MEVQLGLGRVYPRPPSKTYRGAFQNLFQSVREVIQNPGPRHPEAASAAPPGASLLLLQQQQQQQQQQQQQQQQQQQQQQQETSPRQQQQQQGEDGSPQAHRRGPTGYLVLDEEQQPSQPQSALECHPERGCVPEPGAAVAASKGLPQQLPAPPDEDDSAAPSTLSLLGPTFPGLSSCSADLKDILSEASTMQLLQQQQQEAVSEGSSSGRAREASGAPTSSKDNYLGGTSTISDNAKELCKAVSVSMGLGVEALEHLSPGEQLRGDCMYAPLLGVPPAVRPTPCAPLAECKGSLLDDSAGKSTEDTAEYSPFKGGYTKGLEGESLGCSGSAAAGSSGTLELPSTLSLYKSGALDEAAAYQSRDYYNFPLALAGPPPPPPPPHPHARIKLENPLDYGSAWAAAAAQCRYGDLASLHGAGAAGPGSGSPSAAASSSWHTLFTAEEGQLYGPCGGGGGGGGGGGGGGGGGGGGGGGEAGAVAPYGYTRPPQGLAGQESDFTAPDVWYPGGMVSRVPYPSPTCVKSEMGPWMDSYSGPYGDMRLETARDHVLPIDYYFPPQKTCLICGDEASGCHYGALTCGSCKVFFKRAAEGKQKYLCASRNDCTIDKFRRKNCPSCRLRKCYEAGMTLGARKLKKLGNLKLQEEGEASSTTSPTEETTQKLTVSHIEGYECQPIFLNVLEAIEPGVVCAGHDNNQPDSFAALLSSLNELGERQLVHVVKWAKALPGFRNLHVDDQMAVIQYSWMGLMVFAMGWRSFTNVNSRMLYFAPDLVFNEYRMHKSRMYSQCVRMRHLSQEFGWLQITPQEFLCMKALLLFSIIPVDGLKNQKFFDELRMNYIKELDRIIACKRKNPTSCSRRFYQLTKLLDSVQPIARELHQFTFDLLIKSHMVSVDFPEMMAEIISVQVPKILSGKVKPIYFHTQ

SEQ ID NO: 210 - protein, 412 aa, Artificial Sequence [sequence omitted]

SEQ ID NO: 211 - protein, 327 aa, Artificial Sequence
  ARTC1/m__Homo_sapiens__P52961
MQMPAMMSLLLVSVGLMEALQAQSHPITRRDLFSQEIQLDMALASFDDQYAGCAAAMTAALPDLNHTEFQANQVYADSWTLASSQWQERQARWPEWSLSPTRPSPPPLGFRDEHGVALLAYTANSPLHKEFNAAVREAGRSRAHYLHHFSFKTLHFLLTEALQLLGSGQRPPRCHQVFRGVHGLRFRPAGPRATVRLGGFASASLKHVAAQQFGEDTFFGIWTCLGAPIKGYSFFPGEEEVLIPPFETFQVINASRLAQGPARIYLRALGKHSTYNCEYIKDKKCKSGPCHLDNSAMGQSPLSAVWSLLLLLWFLVVRAFPDGPGLL

SEQ ID NO: 212 - protein, 344 aa, Artificial Sequence
  AURKB__Homo_sapiens__Q96GD4
MAQKENSYPWPYGRQTAPSGLSTLPQRVLRKEPVTPSALVLMSRSNVQPTAAPGQKVMENSSGTPDILTRHFTIDDFEIGRPLGKGKFGNVYLAREKKSHFIVALKVLFKSQIEKEGVEHQLRREIEIQAHLHHPNILRLYNYFYDRRRIYLILEYAPRGELYKELQKSCTFDEQRTATIMEELADALMYCHGKKVIHRDIKPENLLLGLKGELKIADFGWSVHAPSLRRKTMCGTLDYLPPEMIEGRMHNEKVDLWCIGVLCYELLVGNPPFESASHNETYRRIVKVDLKFPASVPMGAQDLISKLLRHNPSERLPLAQVSAHPWVRANSRRVLPPSALQSVA

SEQ ID NO: 213 - protein, 119 aa, Artificial Sequence
  B2MG__Homo_sapiens__P61769
MSRSVALAVLALLSLSGLEAIQRTPKIQVYSRHPAENGKSNFLNCYVSGFHPSDIEVDLLKNGERIEKVEHSDLSFSKDWSFYLLYYTEFTPTEKDEYACRVNHVTLSQPKIVKWDRDM

SEQ ID NO: 214 - protein, 378 aa, Artificial Sequence
  B3GN5__Homo_sapiens__Q9BYG0
MRMLVSGRRVKKWQLIIQLFATCFLASLMFFWEPIDNHIVSHMKSYSYRYLINSYDFVNDTLSLKHTSAGPRYQYLINHKEKCQAQDVLLLLFVKTAPENYDRRSGIRRTWGNENYVRSQLNANIKTLFALGTPNPLEGEELQRKLAWEDQRYNDIIQQDFVDSFYNLTLKLLMQFSWANTYCPHAKFLMTADDDIFIHMPNLIEYLQSLEQIGVQDFWIGRVHRGAPPIRDKSSKYYVSYEMYQWPAYPDYTAGAAYVISGDVAAKVYEASQTLNSSLYIDDVFMGLCANKIGIVPQDHVFFSGEGKTPYHPCIYEKMMTSHGHLEDLQDLWKNATDPKVKTISKGFFGQIYCRLMKIILLCKISYVDTYPCRAAFI

SEQ ID NO: 215 - protein, 533 aa, Artificial Sequence
  B4GN1__Homo_sapiens__Q00973
MWLGRRALCALVLLLACASLGLLYASTRDAPGLRLPLAPWAPPQSPRRPELPDLAPEPRYAHIPVRIKEQVVGLLAWNNCSCESSGGGLPLPFQKQVRAIDLTKAFDPAELRAASATREQEFQAFLSRSQSPADQLLIAPANSPLQYPLQGVEVQPLRSILVPGLSLQAASGQEVYQVNLTASLGTWDVAGEVTGVTLTGEGQADLTLVSPGLDQLNRQLQLVTYSSRSYQTNTADTVRFSTEGHEAAFTIRIRHPPNPRLYPPGSLPQGAQYNISALVTIATKTFLRYDRLRALITSIRRFYPTVTVVIADDSDKPERVSGPYVEHYLMPFGKGWFAGRNLAVSQVTTKYVLWVDDDFVFTARTRLERLVDVLERTPLDLVGGAVREISGFATTYRQLLSVEPGAPGLGNCLRQRRGFHHELVGFPGCVVTDGVVNFFLARTDKVREVGFDPRLSRVAHLEFFLDGLGSLRVGSCSDVVVDHASKLKLPWTSRDAGAETYARYRYPGSLDESQMAKHRLLFFKHRLQCMTSQ

SEQ ID NO: 216 - protein, 282 aa, Artificial Sequence
  B7H4__Homo_sapiens__Q7Z7D3
MASLGQILFWSIISIIIILAGAIALIIGFGISGRHSITVTTVASAGNIGEDGILSCTFEPDIKLSDIVIQWLKEGVLGLVHEFKEGKDELSEQDEMFRGRTAVFADQVIVGNASLRLKNVQLTDAGTYKCYIITSKGKGNANLEYKTGAFSMPEVNVDYNASSETLRCEAPRWFPQPTVVWASQVDQGANFSEVSNTSFELNSENVTMKVVSVLYNVTINNTYSCMIENDIAKATGDIKVTESEIKRRSHLQLLNSKASLCVSSFFAISWALLPLSPYLMLK

SEQ ID NO: 217 - protein, 43 aa, Artificial Sequence
  BAGE-1__Homo_sapiens__Q13072
MAARAVFLALSAQLLQARLMKEESPVVSWRLEPEDGTALCFIF

SEQ ID NO: 218 - protein, 385 aa, Artificial Sequence
  BASI__Homo_sapiens__P35613
MAAALFVLLGFALLGTHGASGAAGFVQAPLSQQRWVGGSVELHCEAVGSPVPEIQWWFEGQGPNDTCSQLWDGARLDRVHIHATYHQHAASTISIDTLVEEDTGTYECRASNDPDRNHLTRAPRVKWVRAQAVVLVLEPGTVFTTVEDLGSKILLTCSLNDSATEVTGHRWLKGGVVLKEDALPGQKTEFKVDSDDQWGEYSCVFLPEPMGTANIQLHGPPRVKAVKSSEHINEGETAMLVCKSESVPPVTDWAWYKITDSEDKALMNGSESRFFVSSSQGRSELHIENLNMEADPGQYRCNGTSSKGSDQAIITLRVRSHLAALWPFLGIVAEVLVLVTIIFIYEKRRKPEDVLDDDDAGSAPLKSSGQHQNDKGKNVRQRNSS

SEQ ID NO: 219 - protein, 239 aa, Artificial Sequence [sequence omitted]

SEQ ID NO: 220 - protein, 429 aa, Artificial Sequence [sequence omitted]

SEQ ID NO: 221 - protein, 554 aa, Artificial Sequence [sequence omitted]

SEQ ID NO: 222 - protein, 514 aa, Artificial Sequence [sequence omitted]

SEQ ID NO: 223 - protein, 441 aa, Artificial Sequence
  bcr/abl__Homo_sapiens__A9UEZ9
MVDPVGFAEAWKAQFPDSEPPRMELRSVGDIEQELERCKASIRRLEQEVNQERFRMIYLQTLLAKEKKSYDRQRWGFRRAAQAPDGASEPRASASRPQPAPADGADPPPAEEPEARPDGEGSPGKARPGTARRPGAAASGERDDRGPPASVAALRSNFERIRKGHGQPGADAEKPFYVNVEFHHERGLVKVNDKEVSDRISSLGSQAMQMERKKSQHGAGSSVGDASRPPYRGRSSESSCGVDGDYEDAELNPRFLKDNLIDANGGSRPPWPPLEYQPYQSIYVGGMMEGEGKGPLLRSQSTSEQEKRLTWPRRSYSPRSFEDCGGGYTPDCSSNENLTSSEEDFSSGQSSRVSPSPTTYRMFRDKSRSPSQNSQQSFDSSSPPTPQCHKRHRHCPVVVSEATIVGVRKTGQIWPNDGEGAFHGDADGSLELQGKPSRWTQ

SEQ ID NO: 224 - protein, 524 aa, Artificial Sequence
  bcr/abl__Homo_sapiens__A9UF00
MVDPVGFAEAWKAQFPDSEPPRMELRSVGDIEQELERCKASIRRLEQEVNQERFRMIYLQTLLAKEKKSYDRQRWGFRRAAQAPDGASEPRASASRPQPAPADGADPPPAEEPEARPDGEGSPGKARPGTARRPGAAASGERDDRGPPASVAALRSNFERIRKGHGQPGADAEKPFYVNVEFHHERGLVKVNDKEVSDRISSLGSQAMQMERKKSQHGAGSSVGDASRPPYRGRSSESSCGVDGDYEDAELNPRFLKDNLIDANGGSRPPWPPLEYQPYQSIYVGGMMEGEGKGPLLRSQSTSEQEKRLTWPRRSYSPRSFEDCGGGYTPDCSSNENLTSSEEDFSSGQSSRVSPSPTTYRMFRDKSRSPSQNSQQSFDSSSPPTPQCHKRHRHCPVVVSEATIVGVRKTGQIWPNDGEGAFHGDADGSFGTPPGYGCAADRAEEQRRHQDGLPYIDDSPSSSPHLSSKGRGSRDALVSGALESTKASELDLEKGLEMRKWDPVKMTPTFSLHCMILWPVEITL

SEQ ID NO: 225 - protein, 465 aa, Artificial Sequence
  bcr/abl__Homo_sapiens__A9UF01
MVDPVGFAEAWKAQFPDSEPPRMELRSVGDIEQELERCKASIRRLEQEVNQERFRMIYLQTLLAKEKKSYDRQRWGFRRAAQAPDGASEPRASASRPQPAPADGADPPPAEEPEARPDGEGSPGKARPGTARRPGAAASGERDDRGPPASVAALRSNFERIRKGHGQPGADAEKPFYVNVEFHHERGLVKVNDKEVSDRISSLGSQAMQMERKKSQHGAGSSVGDASRPPYRGRSSESSCGVDGDYEDAELNPRFLKDNLIDANGGSRPPWPPLEYQPYQSIYVGGMMEGEGKGPLLRSQSTSEQEKRLTWPRRSYSPRSFEDCGGGYTPDCSSNENLTSSEEDFSSGQSSRVSPSPTTYRMFRDKSRSPSQNSQQSFDSSSPPTPQCHKRHRHCPVVVSEATIVGVRKTGQIWPNDGEGAFHGEHPGAAEEVFQKLLPDIRGAADADQLVCETPDCPQHSADHQ

SEQ ID NO: 226 - protein, 458 aa, Artificial Sequence
  bcr/abl__Homo_sapiens__A9UF03
MVDPVGFAEAWKAQFPDSEPPRMELRSVGDIEQELERCKASIRRLEQEVNQERFRMIYLQTLLAKEKKSYDRQRWGFRRAAQAPDGASEPRASASRPQPAPADGADPPPAEEPEARPDGEGSPGKARPGTARRPGAAASGERDDRGPPASVAALRSNFERIRKGHGQPGADAEKPFYVNVEFHHERGLVKVNDKEVSDRISSLGSQAMQMERKKSQHGAGSSVGDASRPPYRGRSSESSCGVDGDYEDAELNPRFLKDNLIDANGGSRPPWPPLEYQPYQSIYVGGMMEGEGKGPLLRSQSTSEQEKRLTWPRRSYSPRSFEDCGGGYTPDCSSNENLTSSEEDFSSGQSSRVSPSPTTYRMFRDKSRSPSQNSQQSFDSSSPPTPQCHKRHRHCPVVVSEATIVGVRKTGQIWPNDGEGAFHGDADGSFGTPPGYCCLCLPAWPSGCTAATARVTRS

SEQ ID NO: 227 - protein, 454 aa, Artificial Sequence
  bcr/abl__Homo_sapiens__A9UF04
MVDPVGFAEAWKAQFPDSEPPRMELRSVGDIEQELERCKASIRRLEQEVNQERFRMIYLQTLLAKEKKSYDRQRWGFRRAAQAPDGASEPRASASRPQPAPADGADPPPAEEPEARPDGEGSPGKARPGTARRPGAAASGERDDRGPPASVAALRSNFERIRKGHGQPGADAEKPFYVNVEFHHERGLVKVNDKEVSDRISSLGSQAMQMERKKSQHGAGSSVGDASRPPYRGRSSESSCGVDGDYEDAELNPRFLKDNLIDANGGSRPPWPPLEYQPYQSIYVGGMMEGEGKGPLLRSQSTSEQEKRLTWPRRSYSPRSFEDCGGGYTPDCSSNENLTSSEEDFSSGQSSRVSPSPTTYRMFRDKSRSPSQNSQQSFDSSSPPTPQCHKRHRHCPVVVSEATIVGVRKTGQIWPNDGEGAFHGDADGSFGTPPGYGCAAGRPPHLTELPVQHQ

SEQ ID NO: 228 - protein, 467 aa, Artificial Sequence
  bcr/abl__Homo_sapiens__A9UF05
MVDPVGFAEAWKAQFPDSEPPRMELRSVGDIEQELERCKASIRRLEQEVNQERFRMIYLQTLLAKEKKSYDRQRWGFRRAAQAPDGASEPRASASRPQPAPADGADPPPAEEPEARPDGEGSPGKARPGTARRPGAAASGERDDRGPPASVAALRSNFERIRKGHGQPGADAEKPFYVNVEFHHERGLVKVNDKEVSDRISSLGSQAMQMERKKSQHGAGSSVGDASRPPYRGRSSESSCGVDGDYEDAELNPRFLKDNLIDANGGSRPPWPPLEYQPYQSIYVGGMMEGEGKGPLLRSQSTSEQEKRLTWPRRSYSPRSFEDCGGGYTPDCSSNENLTSSEEDFSSGQSSRVSPSPTTYRMFRDKSRSPSQNSQQSFDSSSPPTPQCHKRHRHCPVVVSEATIVGVRKTGQIWPNDGEGAFHGDAVLKTEVPHQGVRRARLSLEALGEDPSFLFPASDGPRHSSTW

SEQ ID NO: 229 - protein, 513 aa, Artificial Sequence
  bcr/abl__Homo_sapiens__A9UF06
MVDPVGFAEAWKAQFPDSEPPRMELRSVGDIEQELERCKASIRRLEQEVNQERFRMIYLQTLLAKEKKSYDRQRWGFRRAAQAPDGASEPRASASRPQPAPADGADPPPAEEPEARPDGEGSPGKARPGTARRPGAAASGERDDRGPPASVAALRSNFERIRKGHGQPGADAEKPFYVNVEFHHERGLVKVNDKEVSDRISSLGSQAMQMERKKSQHGAGSSVGDASRPPYRGRSSESSCGVDGDYEDAELNPRFLKDNLIDANGGSRPPWPPLEYQPYQSIYVGGMMEGEGKGPLLRSQSTSEQEKRLTWPRRSYSPRSFEDCGGGYTPDCSSNENLTSSEEDFSSGQSSRVSPSPTTYRMFRDKSRSPSQNSQQSFDSSSPPTPQCHKRHRHCPVVVSEATIVGVRKTGQIWPNDGEGAFHGDADGSFGTPPGYGCAADRAEEQRRHQDGLPYIDDSPSSSPHLSSKGRGSRDALVSGALESTKASELDPVKMTPTFSLHCMILWPVEITL

SEQ ID NO: 230 - protein, 406 aa, Artificial Sequence [sequence omitted]

SEQ ID NO: 231 - protein, 781 aa, Artificial Sequence
  beta-catenin/m__Homo_sapiens__P35222
MATQADLMELDMAMEPDRKAAVSHWQQQSYLDSGIHSGATTTAPSLSGKGNPEEEDVDTSQVLYEWEQGFSQSFTQEQVADIDGQYAMTRAQRVRAAMFPETLDEGMQIPSTQFDAAHPTNVQRLAEPSQMLKHAVVNLINYQDDAELATRAIPELTKLLNDEDQVVVNKAAVMVHQLSKKEASRHAIMRSPQMVSAIVRTMQNTNDVETARCTAGTLHNLSHHREGLLAIFKSGGIPALVKMLGSPVDSVLFYAITTLHNLLLHQEGAKMAVRLAGGLQKMVALLNKTNVKFLAITTDCLQILAYGNQESKLIILASGGPQALVNIMRTYTYEKLLWTTSRVLKVLSVCSSNKPAIVEAGGMQALGLHLTDPSQRLVQNCLWTLRNLSDAATKQEGMEGLLGTLVQLLGSDDINVVTCAAGILSNLTCNNYKNKMMVCQVGGIEALVRTVLRAGDREDITEPAICALRHLTSRHQEAEMAQNAVRLHYGLPVVVKLLHPPSHWPLIKATVGLIRNLALCPANHAPLREQGAIPRLVQLLVRAHQDTQRRTSMGGTQQQFVEGVRMEEIVEGCTGALHILARDVHNRIVIRGLNTIPLFVQLLYSPIENIQRVAAGVLCELAQDKEAAEAIEAEGATAPLTELLHSRNEGVATYAAAVLFRMSEDKPQDYKKRLSVELTSSLFRTEPMAWNETADLGLDIGAQGEPLGYRQDDPSYRSFHSGGYGQDALGMDPMMEHEMGGHHPGADYPVDGLPDLGHAQDLMDGLPPGDSNQLAWFDTDL

SEQ ID NO: 232 - protein, 563 aa, Artificial Sequence
  beta-catenin/m__Homo_sapiens__Q8WYA6
MDVGELLSYQPNRGTKRPRDDEEEEQKMRRKQTGTRERGRYREEEMTVVEEADDDKKRLLQIIDRDGEEEEEEEEPLDESSVKKMILTFEKRSYKNQELRIKFPDNPEKFMESELDLNDIIQEMHVVATMPDLYHLLVELNAVQSLLGLLGHDNTDVSIAVVDLLQELTDIDTLHESEEGAEVLIDALVDGQVVALLVQNLERLDESVKEEADGVHNTLAIVENMAEFRPEMCTEGAQQGLLQWLLKRLKAKMPFDANKLYCSEVLAILLQDNDENRELLGELDGIDVLLQQLSVFKRHNPSTAEEQEMMENLFDSLCSCLMLSSNRERFLKGEGLQLMNLMLREKKISRSSALKVLDHAMIGPEGTDNCHKFVDILGLRTIFPLFMKSPRKIKKVGTTEKEHEEHVCSILASLLRNLRGQQRTRLLNKFTENDSEKVDRLMELHFKYLGAMQVADKKIEGEKHDMVRRGEIIDNDTEEEFYLRRLDAGLFVLQHICYIMAEICNANVPQIRQRVHQILNMRGSSIKIVRHIIKEYAENIGDGRSPEFRENEQKRILGLLENF

SEQ ID NO: 233 - protein, 610 aa, Artificial Sequence
  BING-4__Homo_sapiens__O15213
METAPKPGKDVPPKKDKLQTKRKKPRRYWEEETVPTTAGASPGPPRNKKNRELRPQRPKNAYILKKSRISKKPQVPKKPREWKNPESQRGLSGTQDPFPGPAPVPVEVVQKFCRIDKSRKLPHSKAKTRSRLEVAEAEEEETSIKAARSELLLAEEPGFLEGEDGEDTAKICQADIVEAVDIASAAKHFDLNLRQFGPYRLNYSRTGRHLAFGGRRGHVAALDWVTKKLMCEINVMEAVRDIRFLHSEALLAVAQNRWLHIYDNQGIELHCIRRCDRVTRLEFLPFHFLLATASETGFLTYLDVSVGKIVAALNARAGRLDVMSQNPYNAVIHLGHSNGTVSLWSPAMKEPLAKILCHRGGVRAVAVDSTGTYMATSGLDHQLKIFDLRGTYQPLSTRTLPHGAGHLAFSQRGLLVAGMGDVVNIWAGQGKASPPSLEQPYLTHRLSGPVHGLQFCPFEDVLGVGHTGGITSMLVPGAGEPNFDGLESNPYRSRKQRQEWEVKALLEKVPAELICLDPRALAEVDVISLEQGKKEQIERLGYDPQAKAPFQPKPKQKGRSSTASLVKRKRKVMDEEHRDKVRQSLQQQHHKEAKAKPTGARPSALDRFVR

SEQ ID NO: 234 - protein, 298 aa, Artificial Sequence
  BIRC7__Homo_sapiens__Q96CA5
MGPKDSAKCLHRGPQPSHWAAGDGPTQERCGPRSLGSPVLGLDTCRAWDHVDGQILGQLRPLTEEEEEEGAGATLSRGPAFPGMGSEELRLASFYDWPLTAEVPPELLAAAGFFHTGHQDKVRCFFCYGGLQSWKRGDDPWTEHAKWFPSCQFLLRSKGRDFVHSVQETHSQLLGSWDPWEEPEDAAPVAPSVPASGYPELPTPRREVQSESAQEPGGVSPAEAQRAWWVLEPPGARDVEAQLRRLQEERTCKVCLDRAVSIVFVPCGHLVCAECAPGLQLCPICRAPVRSRVRTFLS

SEQ ID NO: 235 - protein, 759 aa, Artificial Sequence
  BRCA1/m__Homo_sapiens__A0A024R1V0
MDLSALRVEEVQNVINAMQKILECPICLELIKEPVSTKCDHIFCKFCMLKLLNQKKGPSQCPLCKNDITKRSLQESTRFSQLVEELLKIICAFQLDTGLEYANSYNFAKKENNSPEHLKDEVSIIQSMGYRNRAKRLLQSEPENPSLQETSLSVQLSNLGTVRTLRTKQRIQPQKTSVYIELGSDSSEDTVNKATYCSVGDQELLQITPQGTRDEISLDSAKKAACEFSETDVTNTEHHQPSNNDLNTTEKRAAERHPEKYQGEAASGCESETSVSEDCSGLSSQSDILTTQQRDTMQHNLIKLQQEMAELEAVLEQHGSQPSNSYPSIISDSSALEDLRNPEQSTSEKVLTSQKSSEYPISQNPEGLSADKFEVSADSSTSKNKEPGVERSSPSKCPSLDDRWYMHSCSGSLQNRNYPSQEELIKVVDVEEQQLEESGPHDLTETSYLPRQDLEGTPYLESGISLFSDDPESDPSEDRAPESARVGNIPSSTSALKVPQLKVAESAQSPAAAHTTDTAGYNAMEESVSREKPELTASTERVNKRMSMVVSGLTPEEFMLVYKFARKHHITLTNLITEETTHVVMKTDAEFVCERTLKYFLGIAGGKWVVSYFWVTQSIKERKMLNEHDFEVRGDVVNGRNHQGPKRARESQDRKIFRGLEICCYGPFTNMPTDQLEWMVQLCGASVVKELSSFTLGTGVHPIVVVQPDAWTEDNGFHAIGQMCEAPVVTREWVLDSVALYQCQELDTYLIPQIPHSHY

SEQ ID NO: 236 - protein, 719 aa, Artificial Sequence
  BRCA1/m__Homo_sapiens__A0A024R1V7
MDLSALRVEEVQNVINAMQKILECPICLELIKEPVSTKCDHIFCKFCMLKLLNQKKGPSQCPLCKNDITKRSLQESTRFSQLVEELLKIICAFQLDTGLEYANSYNFAKKENNSPEHLKDEVSIIQSMGYRNRAKRLLQSEPENPSLQETSLSVQLSNLGTVRTLRTKQRIQPQKTSVYIELAACEFSETDVTNTEHHQPSNNDLNTTEKRAAERHPEKYQGEAASGCESETSVSEDCSGLSSQSDILTTQQRDTMQHNLIKLQQEMAELEAVLEQHGSQPSNSYPSIISDSSALEDLRNPEQSTSEKAVLTSQKSSEYPISQNPEGLSADKFEVSADSSTSKNKEPGVERSSPSKCPSLDDRWYMHSCSGSLQNRNYPSQEELIKVVDVEEQQLEESGPHDLTETSYLPRQDLEGTPYLESGISLFSDDPESDPSEDRAPESARVGNIPSSTSALKVPQLKVAESAQSPAAAHTTDTAGYNAMEESVSREKPELTASTERVNKRMSMVVSGLTPEEFMLVYKFARKHHITLTNLITEETTHVVMKTDAEFVCERTLKYFLGIAGGKWVVSYFWVTQSIKERKMLNEHDFEVRGDVVNGRNHQGPKRARESQDRKIFRGLEICCYGPFTNMPTDQLEWMVQLCGASVVKELSSFTLGTGVHPIVVVQPDAWTEDNGFHAIGQMCEAPVVTREWVLDSVALYQCQELDTYLIPQIPHSHY

SEQ ID NO: 237 - protein, 721 aa, Artificial Sequence
  BRCA1/m__Homo_sapiens__A0A024R1Z8
MDLSALRVEEVQNVINAMQKILECPICLELIKEPVSTKCDHIFCKFCMLKLLNQKKGPSQCPLCKNDITKRSLQESTRFSQLVEELLKIICAFQLDTGLEYANSYNFAKKENNSPEHLKDEVSIIQSMGYRNRAKRLLQSEPENPSLQETSLSVQLSNLGTVRTLRTKQRIQPQKTSVYIELGSDSSEDTVNKATYCSVGDQELLQITPQGTRDEISLDSAKKGEAASGCESETSVSEDCSGLSSQSDILTTQQRDTMQHNLIKLQQEMAELEAVLEQHGSQPSNSYPSIISDSSALEDLRNPEQSTSEKAVLTSQKSSEYPISQNPEGLSADKFEVSADSSTSKNKEPGVERSSPSKCPSLDDRWYMHSCSGSLQNRNYPSQEELIKVVDVEEQQLEESGPHDLTETSYLPRQDLEGTPYLESGISLFSDDPESDPSEDRAPESARVGNIPSSTSALKVPQLKVAESAQSPAAAHTTDTAGYNAMEESVSREKPELTASTERVNKRMSMVVSGLTPEEFMLVYKFARKHHITLTNLITEETTHVVMKTDAEFVCERTLKYFLGIAGGKWVVSYFWVTQSIKERKMLNEHDFEVRGDVVNGRNHQGPKRARESQDRKIFRGLEICCYGPFTNMPTDQLEWMVQLCGASVVKELSSFTLGTGVHPIVVVQPDAWTEDNGFHAIGQMCEAPVVTREWVLDSVALYQCQELDTYLIPQIPHSHY

SEQ ID NO: 238 - protein, 11 aa, Artificial Sequence
  BRCA1/m__Homo_sapiens__A0A068BFX7
MDLSALRVEEV

SEQ ID NO: 239 - protein, 173 aa, Artificial Sequence
  BRCA1/m__Homo_sapiens__C6YB45
MDAEFVCERTLKYFLGIAGGKWVVSYFWVTQSIKERKMLNEHDFEVRGDVVNGRNHQGPKRARESQDRKIFRGLEICCYGPFTNMPTDQLEWMVQLCGASVVKELSSFTLGTGVHPIVVVQPDAWTEDNGFHAIGQMCEAPVVTREWVLDSVALYQCQELDTYLIPQIPHSHY

SEQ ID NO: 240 - protein, 354 aa, Artificial Sequence [sequence omitted]

SEQ ID NO: 241 - protein, 680 aa, Artificial Sequence
  BRCA1/m__Homo_sapiens__G3XAC3
MDLSALRVEEVQNVINAMQKILECPICLELIKEPVSTKCDHIFCKFCMLKLLNQKKGPSQCPLCKNDITKRSLQESTRFSQLVEELLKIICAFQLDTGLEYANSYNFAKKENNSPEHLKDEVSIIQSMGYRNRAKRLLQSEPENPSLQETSLSVQLSNLGTVRTLRTKQRIQPQKTSVYIELGEAASGCESETSVSEDCSGLSSQSDILTTQQRDTMQHNLIKLQQEMAELEAVLEQHGSQPSNSYPSIISDSSALEDLRNPEQSTSEKAVLTSQKSSEYPISQNPEGLSADKFEVSADSSTSKNKEPGVERSSPSKCPSLDDRWYMHSCSGSLQNRNYPSQEELIKVVDVEEQQLEESGPHDLTETSYLPRQDLEGTPYLESGISLFSDDPESDPSEDRAPESARVGNIPSSTSALKVPQLKVAESAQSPAAAHTTDTAGYNAMEESVSREKPELTASTERVNKRMSMVVSGLTPEEFMLVYKFARKHHITLTNLITEETTHVVMKTDAEFVCERTLKYFLGIAGGKWVVSYFWVTQSIKERKMLNEHDFEVRGDVVNGRNHQGPKRARESQDRKIFRGLEICCYGPFTNMPTDQLEWMVQLCGASVVKELSSFTLGTGVHPIVVVQPDAWTEDNGFHAIGQMCEAPVVTREWVLDSVALYQCQELDTYLIPQIPHSHY

SEQ ID NO: 242 - protein, 181 aa, Artificial Sequence
  BY55__Homo_sapiens__O95971
MLLEPGRGCCALAILLAIVDIQSGGCINITSSASQEGTRLNLICTVWHKKEEAEGFVVFLCKDRSGDCSPETSLKQLRLKRDPGIDGVGEISSQLMFTISQVTPLHSGTYQCCARSQKSGIRLQGHFFSILFTETGNYTVTGLKQRQHLEFSHNEGTLSSGFLQEKVWVMLVTSLVALQAL

SEQ ID NO: 243 - protein, 109 aa, Artificial Sequence [sequence omitted]

SEQ ID NO: 244 - protein, 522 aa, Artificial Sequence
  CASPA__Homo_sapiens__Q92851-4
MKSQGQHWYSSSDKNCKVSFREKLLIIDSNLGVQDVENLKFLCIGLVPNKKLEKSSSASDVFEHLLAEDLLSEEDPFFLAELLYIIRQKKLLQHLNCTKEEVERLLPTRQRVSLFRNLLYELSEGIDSENLKDMIFLLKDSLPKTEMTSLSFLAFLEKQGKIDEDNLTCLEDLCKTVVPKLLRNIEKYKREKAIQIVTPPVDKEAESYQGEEELVSQTDVKTFLEALPQESWQNKHAGSNGNRATNGAPSLVSRGMQGASANTLNSETSTKRAAVYRMNRNHRGLCVIVNNHSFTSLKDRQGTHKDAEILSHVFQWLGFTVHIHNNVTKVEMEMVLQKQKCNPAHADGDCFVFCILTHGRFGAVYSSDEALIPIREIMSHFTALQCPRLAEKPKLFFIQACQGEEIQPSVSIEADALNPEQAPTSLQDSIPAEADFLLGLATVPGYVSFRHVEEGSWYIQSLCNHLKKLVPRHEDILSILTAVNDDVSRRVDKQGTKKQMPQPAFTLRKKLVFPVPLDALSL

SEQ ID NO: 245 - protein, 339 aa, Artificial Sequence
  cathepsin_B__Homo_sapiens__A0A024R374
MWQLWASLCCLLVLANARSRPSFHPLSDELVNYVNKRNTTWQAGHNFYNVDMSYLKRLCGTFLGGPKPPQRVMFTEDLKLPASFDAREQWPQCPTIKEIRDQGSCGSCWAFGAVEAISDRICIHTNAHVSVEVSAEDLLTCCGSMCGDGCNGGYPAEAWNFWTRKGLVSGGLYESHVGCRPYSIPPCEHHVNGSRPPCTGEGDTPKCSKICEPGYSPTYKQDKHYGYNSYSVSNSEKDIMAEIYKNGPVEGAFSVYSDFLLYKSGVYQHVTGEMMGGHAIRILGWGVENGTPYWLVANSWNTDWGDNGFFKILRGQDHCGIESEVVAGIPRTDQYWEKI

SEQ ID NO: 246 - protein, 339 aa, Artificial Sequence; identical to SEQ ID NO: 245
  cathepsin_B__Homo_sapiens__P07858

SEQ ID NO: 247 - protein, 333 aa, Artificial Sequence [sequence omitted]

SEQ ID NO: 248 - protein, 333 aa, Artificial Sequence [sequence omitted]

SEQ ID NO: 249 - protein, 151 aa, Artificial Sequence
  cathepsin_L__Homo_sapiens__Q9HBQ7
MDYAFQYVQDNGGLDSEESYPYEATEESCKYNPKYSVANDTGFVDIPKQEKALMKAVATVGPISVAIDAGHESFLFYKEGIYFEPDCSSEDMDHGVLVVGYGFESTESDNNKYWLVKNSWGEEWGMGGYVKMAKDRRNHCGIASAASYPTV

SEQ ID NO: 250 - protein, 327 aa, Artificial Sequence
  CD1A__Homo_sapiens__P06126
MLFLLLPLLAVLPGDGNADGLKEPLSFHVTWIASFYNHSWKQNLVSGWLSDLQTHTWDSNSSTIVFLCPWSRGNFSNEEWKELETLFRIRTIRSFEGIRRYAHELQFEYPFEIQVTGGCELHSGKVSGSFLQLAYQGSDFVSFQNNSWLPYPVAGNMAKHFCKVLNQNQHENDITHNLLSDTCPRFILGLLDAGKAHLQRQVKPEAWLSHGPSPGPGHLQLVCHVSGFYPKPVWVMWMRGEQEQQGTQRGDILPSADGTWYLRATLEVAAGEAADLSCRVKHSSLEGQDIVLYWEHHSSVGFIILAVIVPLLLLIGLALWFRKRCFC

SEQ ID NO: 251 - protein, 333 aa, Artificial Sequence
  CD1B__Homo_sapiens__P29016
MLLLPFQLLAVLFPGGNSEHAFQGPTSFHVIQTSSFTNSTWAQTQGSGWLDDLQIHGWDSDSGTAIFLKPWSKGNFSDKEVAELEEIFRVYIFGFAREVQDFAGDFQMKYPFEIQGIAGCELHSGGAIVSFLRGALGGLDFLSVKNASCVPSPEGGSRAQKFCALIIQYQGIMETVRILLYETCPRYLLGVLNAGKADLQRQVKPEAWLSSGPSPGPGRLQLVCHVSGFYPKPVWVMWMRGEQEQQGTQLGDILPNANWTWYLRATLDVADGEAAGLSCRVKHSSLEGQDIILYWRNPTSIGSIVLAIIVPSLLLLLCLALWYMRRRSYQNIP

SEQ ID NO: 252 - protein, 333 aa, Artificial Sequence
  CD1C__Homo_sapiens__P29017
MLFLQFLLLALLLPGGDNADASQEHVSFHVIQIFSFVNQSWARGQGSGWLDELQTHGWDSESGTIIFLHNWSKGNFSNEELSDLELLFRFYLFGLTREIQDHASQDYSKYPFEVQVKAGCELHSGKSPEGFFQVAFNGLDLLSFQNTTWVPSPGCGSLAQSVCHLLNHQYEGVTETVYNLIRSTCPRFLLGLLDAGKMYVHRQVRPEAWLSSRPSLGSGQLLLVCHASGFYPKPVWVTWMRNEQEQLGTKHGDILPNADGTWYLQVILEVASEEPAGLSCRVRHSSLGGQDIILYWGHHFSMNWIALVVIVPLVILIVLVLWFKKHCSYQDIL

SEQ ID NO: 253 - protein, 335 aa, Artificial Sequence
  CD1D__Homo_sapiens__P15813
MGCLLFLLLWALLQAWGSAEVPQRLFPLRCLQISSFANSSWTRTDGLAWLGELQTHSWSNDSDTVRSLKPWSQGTFSDQQWETLQHIFRVYRSSFTRDVKEFAKMLRLSYPLELQVSAGCEVHPGNASNNFFHVAFQGKDILSFQGTSWEPTQEAPLWVNLAIQVLNQDKWTRETVQWLLNGTCPQFVSGLLESGKSELKKQVKPKAWLSRGPSPGPGRLLLVCHVSGFYPKPVWVKWMRGEQEQQGTQPGDILPNADETWYLRATLDVVAGEAAGLSCRVKHSSLEGQDIVLYWGGSYTSMGLIALAVLACLLFLLIVGFTSRFKRQTSYQGVL

SEQ ID NO: 254 - protein, 388 aa, Artificial Sequence
  CD1E__Homo_sapiens__P15812
MLLLFLLFEGLCCPGENTAAPQALQSYHLAAEEQLSFRMLQTSSFANHSWAHSEGSGWLGDLQTHGWDTVLGTIRFLKPWSHGNFSKQELKNLQSLFQLYFHSFIQIVQASAGQFQLEYPFEIQILAGCRMNAPQIFLNMAYQGSDFLSFQGISWEPSPGAGIRAQNICKVLNRYLDIKEILQSLLGHTCPRFLAGLMEAGESELKRKVKPEAWLSCGPSPGPGRLQLVCHVSGFYPKPVWVMWMRGEQEQRGTQRGDVLPNADETWYLRATLDVAAGEAAGLSCRVKHSSLGGHDLIIHWGGYSIFLILICLTVIVTLVILVVVDSRLKKQSSNKNILSPHTPSPVFLMGANTQDTKNSRHQFCLAQVSWIKNRVLKKWKTRLNQLW

SEQ ID NO: 255 - protein, 297 aa, Artificial Sequence
  CD20__Homo_sapiens__P11836
MTTPRNSVNGTFPAEPMKGPIAMQSGPKPLFRRMSSLVGPTQSFFMRESKTLGAVQIMNGLFHIALGGLLMIPAGIYAPICVTVWYPLWGGIMYIISGSLLAATEKNSRKCLVKGKMIMNSLSLFAAISGMILSIMDILNIKISHFLKMESLNFIRAHTPYINIYNCEPANPSEKNSPSTQYCYSIQSLFLGILSVMLIFAFFQELVIAGIVENEWKRTCSRPKSNIVLLSAEEKKEQTIEIKEEVVGLTETSSQPKNEEDIEIIPIQEEEEEETETNFPEPPQDQESSPIENDSSP

SEQ ID NO: 256 - protein, 662 aa, Artificial Sequence [sequence omitted]

SEQ ID NO: 257 - protein, 847 aa, Artificial Sequence
  CD22__Homo_sapiens__P20273
MHLLGPWLLLLVLEYLAFSDSSKWVFEHPETLYAWEGACVWIPCTYRALDGDLESFILFHNPEYNKNTSKFDGTRLYESTKDGKVPSEQKRVQFLGDKNKNCTLSIHPVHLNDSGQLGLRMESKTEKWMERIHLNVSERPFPPHIQLPPEIQESQEVTLTCLLNFSCYGYPIQLQWLLEGVPMRQAAVTSTSLTIKSVFTRSELKFSPQWSHHGKIVTCQLQDADGKFLSNDTVQLNVKHTPKLEIKVTPSDAIVREGDSVTMTCEVSSSNPEYTTVSWLKDGTSLKKQNTFTLNLREVTKDQSGKYCCQVSNDVGPGRSEEVFLQVQYAPEPSTVQILHSPAVEGSQVEFLCMSLANPLPTNYTWYHNGKEMQGRTEEKVHIPKILPWHAGTYSCVAENILGTGQRGPGAELDVQYPPKKVTTVIQNPMPIREGDTVTLSCNYNSSNPSVTRYEWKPHGAWEEPSLGVLKIQNVGWDNTTIACAACNSWCSWASPVALNVQYAPRDVRVRKIKPLSEIHSGNSVSLQCDFSSSHPKEVQFFWEKNGRLLGKESQLNFDSISPEDAGSYSCWVNNSIGQTASKAWTLEVLYAPRRLRVSMSPGDQVMEGKSATLTCESDANPPVSHYTWFDWNNQSLPYHSQKLRLEPVKVQHSGAYWCQGTNSVGKGRSPLSTLTVYYSPETIGRRVAVGLGSCLAILILAICGLKLQRRWKRTQSQQGLQENSSGQSFFVRNKKVRRAPLSEGPHSLGCYNPMMEDGISYTTLRFPEMNIPRTGDAESSEMQRPPPDCDDTVTYSALHKRQVGDYENVIPDFPEDEGIHYSELIQFGVGERPQAQENVDYVILKH

SEQ ID NO: 258 - protein, 847 aa, Artificial Sequence; identical to SEQ ID NO: 257
  CD22__Homo_sapiens__Q0EAF5

SEQ ID NO: 259 - protein, 534 aa, Artificial Sequence
  CD276__Homo_sapiens__Q5ZPR3
MLRRRGSPGMGVHVGAALGALWFCLTGALEVQVPEDPVVALVGTDATLCCSFSPEPGFSLAQLNLIWQLTDTKQLVHSFAEGQDQGSAYANRTALFPDLLAQGNASLRLQRVRVADEGSFTCFVSIRDFGSAAVSLQVAAPYSKPSMTLEPNKDLRPGDTVTITCSSYQGYPEAEVFWQDGQGVPLTGNVTTSQMANEQGLFDVHSILRVVLGANGTYSCLVRNPVLQQDAHSSVTITPQRSPTGAVEVQVPEDPVVALVGTDATLRCSFSPEPGFSLAQLNLIWQLTDTKQLVHSFTEGRDQGSAYANRTALFPDLLAQGNASLRLQRVRVADEGSFTCFVSIRDFGSAAVSLQVAAPYSKPSMTLEPNKDLRPGDTVTITCSSYRGYPEAEVFWQDGQGVPLTGNVTTSQMANEQGLFDVHSVLRVVLGANGTYSCLVRNPVLQQDAHGSVTITGQPMTFPPEALWVTVGLSVCLIALLVALAFVCWRKIKQSCEEENAGAEDQDGEGEGSKTALQPLKHSDSKEDDGQEIA

SEQ ID NO: 260 - protein, 212 aa, Artificial Sequence
  CD33__Homo_sapiens__B4DF51
MPLLLLLPLLWADLTHRPKILIPGTLEPGHSKNLTCSVSWACEQGTPPIFSWLSAAPTSLGPRTTHSSVLIITPRPQDHGTNLTCQVKFAGAGVTTERTIQLNVTYVPQNPTTGIFPGDGSGKQETRAGVVHGAIGGAGVTALLALCLCLIFFIVKTHRRKAARTAVGRNDTHPTTGSASPVSDGASWHPVCPADTSSQCGPPSCPIQHFQN

SEQ ID NO: 261 - protein, 364 aa, Artificial Sequence
  CD33__Homo_sapiens__P20138
MPLLLLLPLLWAGALAMDPNFWLQVQESVTVQEGLCVLVPCTFFHPIPYYDKNSPVHGYWFREGAIISRDSPVATNKLDQEVQEETQGRFRLLGDPSRNNCSLSIVDARRRDNGSYFFRMERGSTKYSYKSPQLSVHVTDLTHRPKILIPGTLEPGHSKNLTCSVSWACEQGTPPIFSWLSAAPTSLGPRTTHSSVLIITPRPQDHGTNLTCQVKFAGAGVTTERTIQLNVTYVPQNPTTGIFPGDGSGKQETRAGVVHGAIGGAGVTALLALCLCLIFFIVKTHRRKAARTAVGRNDTHPTTGSASPKHQKKSKLHGPTETSSCSGAAPTVEMDEELHYASLNFHGMNPSKDTSTEYSEVRTQ

SEQ ID NO: 262 - protein, 364 aa, Artificial Sequence; identical to SEQ ID NO: 261
  CD33__Homo_sapiens__Q546G0

SEQ ID NO: 263 - protein, 207 aa, Artificial Sequence
  CD3E__Homo_sapiens__P07766
MQSGTHWRVLGLCLLSVGVWGQDGNEEMGGITQTPYKVSISGTTVILTCPQYPGSEILWQHNDKNIGGDEDDKNIGSDEDHLSLKEFSELEQSGYYVCYPRGSKPEDANFYLYLRARVCENCMEMDVMSVATIVIVDICITGGLLLLVYYWSKNRKAKAKPVTRGAGAGGRQRGQNKERPPPVPNPDYEPIRKGQRDLYSGLNQRRI

SEQ ID NO: 264 - protein, 164 aa, Artificial Sequence
  CD3Z__Homo_sapiens__P20963
MKWKALFTAAILQAQLPITEAQSFGLLDPKLCYLLDGILFIYGVILTALFLRVKFSRSADAPAYQQGQNQLYNELNLGRREEYDVLDKRRGRDPEMGGKPQRRKNPQEGLYNELQKDKMAEAYSEIGMKGERRRGKGHDGLYQGLSTATKDTYDALHMQALPPR

SEQ ID NO: 265 - protein, 742 aa, Artificial Sequence
  CD44_Isoform_1__Homo_sapiens__P16070
MDKFWWHAAWGLCLVPLSLAQIDLNITCRFAGVFHVEKNGRYSISRTEAADLCKAFNSTLPTMAQMEKALSIGFETCRYGFIEGHVVIPRIHPNSICAANNTGVYILTSNTSQYDTYCFNASAPPEEDCTSVTDLPNAFDGPITITIVNRDGTRYVQKGEYRTNPEDIYPSNPTDDDVSSGSSSERSSTSGGYIFYTFSTVHPIPDEDSPWITDSTDRIPATTLMSTSATATETATKRQETWDWFSWLFLPSESKNHLHTTTQMAGTSSNTISAGWEPNEENEDERDRHLSFSGSGIDDDEDFISSTISTTPRAFDHTKQNQDWTQWNPSHSNPEVLLQTTTRMTDVDRNGTTAYEGNWNPEAHPPLIHHEHHEEEETPHSTSTIQATPSSTTEETATQKEQWFGNRWHEGYRQTPKEDSHSTTGTAAASAHTSHPMQGRTTPSPEDSSWTDFFNPISHPMGRGHQAGRRMDMDSSHSITLQPTANPNTGLVEDLDRTGPLSMTTQQSNSQSFSTSHEGLEEDKDHPTTSTLTSSNRNDVTGGRRDPNHSEGSTTLLEGYTSHYPHTKESRTFIPVTSAKTGSFGVTAVTVGDSNSNVNRSLSGDQDTFHPSGGSHTTHGSESDGHSHGSQEGGANTTSGPIRTPQIPEWLIILASLLALALILAVCIAVNSRRRCGQKKKLVINSGNGAVEDRKPSGLNGEASKSQEMVHLVNKESSETPDQFMTADETRNLQNVDMKIGV

SEQ ID NO: 266 - protein, 699 aa, Artificial Sequence
  CD44_Isoform_6__Homo_sapiens__P16070-6
MDKFWWHAAWGLCLVPLSLAQIDLNITCRFAGVFHVEKNGRYSISRTEAADLCKAFNSTLPTMAQMEKALSIGFETCRYGFIEGHVVIPRIHPNSICAANNTGVYILTSNTSQYDTYCFNASAPPEEDCTSVTDLPNAFDGPITITIVNRDGTRYVQKGEYRTNPEDIYPSNPTDDDVSSGSSSERSSTSGGYIFYTFSTVHPIPDEDSPWITDSTDRIPATTLMSTSATATETATKRQETWDWFSWLFLPSESKNHLHTTTQMAGTSSNTISAGWEPNEENEDERDRHLSFSGSGIDDDEDFISSTISTTPRAFDHTKQNQDWTQWNPSHSNPEVLLQTTTRMTDVDRNGTTAYEGNWNPEAHPPLIHHEHHEEEETPHSTSTTASAHTSHPMQGRTTPSPEDSSWTDFFNPISHPMGRGHQAGRRMDMDSSHSITLQPTANPNTGLVEDLDRTGPLSMTTQQSNSQSFSTSHEGLEEDKDHPTTSTLTSSNRNDVTGGRRDPNHSEGSTTLLEGYTSHYPHTKESRTFIPVTSAKTGSFGVTAVTVGDSNSNVNRSLSGDQDTFHPSGGSHTTHGSESDGHSHGSQEGGANTTSGPIRTPQIPEWLIILASLLALALILAVCIAVNSRRRCGQKKKLVINSGNGAVEDRKPSGLNGEASKSQEMVHLVNKESSETPDQFMTADETRNLQNVDMKIGV

SEQ ID NO: 267 - protein, 458 aa, Artificial Sequence
  CD4__Homo_sapiens__P01730
MNRGVPFRHLLLVLQLALLPAATQGKKVVLGKKGDTVELTCTASQKKSIQFHWKNSNQIKILGNQGSFLTKGPSKLNDRADSRRSLWDQGNFPLIIKNLKIEDSDTYICEVEDQKEEVQLLVFGLTANSDTHLLQGQSLTLTLESPPGSSPSVQCRSPRGKNIQGGKTLSVSQLELQDSGTWTCTVLQNQKKVEFKIDIVVLAFQKASSIVYKKEGEQVEFSFPLAFTVEKLTGSGELWWQAERASSSKSWITFDLKNKEVSVKRVTQDPKLQMGKKLPLHLTLPQALPQYAGSGNLTLALEAKTGKLHQEVNLVVMRATQLQKNLTCEVWGPTSPKLMLSLKLENKEAKVSKREKAVWVLNPEAGMWQCLLSDSGQVLLESNIKVLPTWSTPVQPMALIVLGGVAGLLLFIGLGIFFCVRCRHRRRQAERMSQIKRLLSEKKTCQCPHRFQKTCSPI

SEQ ID NO: 268 - protein, 61 aa, Artificial Sequence
  CD52__Homo_sapiens__P31358
MKRFLFLLLTISLLVMVQIQTGLSGQNDTSQTSSPSASSNISGGIFLFFVANAIIHLFCFS

SEQ ID NO: 269 - protein, 61 aa, Artificial Sequence
  CD52__Homo_sapiens__Q6IBD0
MKRFLFLLLTISLLVMVQIQTGLSGQNDTSQTSSPSASSSMSGGIFLFFVANAIIHLFCFS

SEQ ID NO: 270 - protein, 61 aa, Artificial Sequence; identical to SEQ ID NO: 268
  CD52__Homo_sapiens__V9HWN9

SEQ ID NO: 271 - protein, 317 aa, Artificial Sequence
  CD55__Homo_sapiens__B1AP15
MTVARPSVPAALPLLGELPRLLLLVLLCLPAVWGDCGLPPDVPNAQPALEGRTSFPEDTVITYKCEESFVKIPGEKDSVICLKGSQWSDIEEFCNQKSCPNPGEIRNGQIDVPGGILFGATISFSCNTGYKLFGSTSSFCLISGSSVQWSDPLPECREIYCPAPPQIDNGIIQGERDHYGYRQSVTYACNKGFTMIGEHSIYCTVNNDEGEWSGPPPECRGKSLTSKVPPTVQKPTTVNVPTTEVSPTSQKTTTKTTTPNAQATRSTPVSRTTKHFHETTPNKGSGTTSGTTRLLSGHTCFTLTGLLGTLVTMGLLT

SEQ ID NO: 272 - protein, 293 aa, Artificial Sequence [sequence omitted]

SEQ ID NO: 273 - protein, 267 aa, Artificial Sequence [sequence omitted]

SEQ ID NO: 274 - protein, 381 aa, Artificial Sequence
  CD55__Homo_sapiens__P08174
MTVARPSVPAALPLLGELPRLLLLVLLCLPAVWGDCGLPPDVPNAQPALEGRTSFPEDTVITYKCEESFVKIPGEKDSVICLKGSQWSDIEEFCNRSCEVPTRLNSASLKQPYITQNYFPVGTVVEYECRPGYRREPSLSPKLTCLQNLKWSTAVEFCKKKSCPNPGEIRNGQIDVPGGILFGATISFSCNTGYKLFGSTSSFCLISGSSVQWSDPLPECREIYCPAPPQIDNGIIQGERDHYGYRQSVTYACNKGFTMIGEHSIYCTVNNDEGEWSGPPPECRGKSLTSKVPPTVQKPTTVNVPTTEVSPTSQKTTTKTTTPNAQATRSTPVSRTTKHFHETTPNKGSGTTSGTTRLLSGHTCFTLTGLLGTLVTMGLLT

SEQ ID NO: 275 - protein, 858 aa, Artificial Sequence
  CD56__Homo_sapiens__P13591
MLQTKDLIWTLFFLGTAVSLQVDIVPSQGEISVGESKFFLCQVAGDAKDKDISWFSPNGEKLTPNQQRISVVWNDDSSSTLTIYNANIDDAGIYKCVVTGEDGSESEATVNVKIFQKLMFKNAPTPQEFREGEDAVIVCDVVSSLPPTIIWKHKGRDVILKKDVRFIVLSNNYLQIRGIKKTDEGTYRCEGRILARGEINFKDIQVIVNVPPTIQARQNIVNATANLGQSVTLVCDAEGFPEPTMSWTKDGEQIEQEEDDEKYIFSDDSSQLTIKKVDKNDEAEYICIAENKAGEQDATIHLKVFAKPKITYVENQTAMELEEQVTLTCEASGDPIPSITWRTSTRNISSEEKASWTRPEKQETLDGHMVVRSHARVSSLTLKSIQYTDAGEYICTASNTIGQDSQSMYLEVQYAPKLQGPVAVYTWEGNQVNITCEVFAYPSATISWFRDGQLLPSSNYSNIKIYNTPSASYLEVTPDSENDFGNYNCTAVNRIGQESLEFILVQADTPSSPSIDQVEPYSSTAQVQFDEPEATGGVPILKYKAEWRAVGEEVWHSKWYDAKEASMEGIVTIVGLKPETTYAVRLAALNGKGLGEISAASEFKTQPVQGEPSAPKLEGQMGEDGNSIKVNLIKQDDGGSPIRHYLVRYRALSSEWKPEIRLPSGSDHVMLKSLDWNAEYEVYVVAENQQGKSKAAHFVFRTSAQPTAIPANGSPTSGLSTGAIVGILIVIFVLLLVVVDITCYFLNKCGLFMCIAVNLCGKAGPGAKGKDMEEGKAAFSKDESKEPIVEVRTEEERTPNHDGGKHTEPNETTPLTEPEKGPVEAKPECQETETKPAPAEVKTVPNDATQTKENESKA

SEQ ID NO: 276 - protein, 288 aa, Artificial Sequence
  CD80__Homo_sapiens__A0N0P2
MGHTRRQGTSPSKCPYLNFFQLLVLAGLSHFCSGVIHVTKEVKEVATLSCGHNVSVEELAQTRIYWQKEKKMVLTMMSGDMNIWPEYKNRTIFDITNNLSIVILALRPSDEGTYECVVLKYEKDAFKREHLAEVTLSVKADFPTPSISDFEIPTSNIRRIICSTSGGFPEPHLSWLENGEELNAINTTVSQDPETELYAVSSKLDFNMTTNHSFMCLIKYGHLRVNQTFNWNTTKQEHFPDNLLPSWAITLISVNGIFVICCLTYCFAPRCRERRRNERLRRESVRPV

SEQ ID NO: 277 - protein, 288 aa, Artificial Sequence; identical to SEQ ID NO: 276
  CD80__Homo_sapiens__P33681

SEQ ID NO: 278 - protein, 329 aa, Artificial Sequence
  CD86__Homo_sapiens__P42081
MDPQCTMGLSNILFVMAFLLSGAAPLKIQAYFNETADLPCQFANSQNQSLSELVVFWQDQENLVLNEVYLGKEKFDSVHSKYMGRTSFDSDSWTLRLHNLQIKDKGLYQCIIHHKKPTGMIRIHQMNSELSVLANFSQPEIVPISNITENVYINLTCSSIHGYPEPKKMSVLLRTKNSTIEYDGVMQKSQDNVTELYDVSISLSVSFPDVTSNMTIFCILETDKTRLLSSPFSIELEDPQPPPDHIPWITAVLPTVIICVMVFCLILWKWKKKKRPRNSYKCGTNTMEREESEQTKKREKIHIPERSDEAQRVFKSSKTSSCDKSDTCF

SEQ ID NO: 279 - protein, 235 aa, Artificial Sequence
  CD8A__Homo_sapiens__P01732
MALPVTALLLPLALLLHAARPSQFRVSPLDRTWNLGETVELKCQVLLSNPTSGCSWLFQPRGAAASPTFLLYLSQNKPKAAEGLDTQRFSGKRLGDTFVLTLSDFRRENEGYYFCSALSNSIMYFSHFVPVFLPAKPTTTPAPRPPTPAPTIASQPLSLRPEACRPAAGGAVHTRGLDFACDIYIWAPLAGTCGVLLLSLVITLYCNHRNRRRVCKCPRPVVKSGDKPSLSARYV

SEQ ID NO: 280 - protein, 823 aa, Artificial Sequence
  CDC27/m__Homo_sapiens__G5EA36
MTVLQEPVQAAIWQALNHYAYRDAVFLAERLYAEVHSEEALFLLATCYYRSGKAYKAYRLLKGHSCTTPQCKYLLAKCCVDLSKLAEGEQILSGGVFNKQKSHDDIVTEFGDSACFTLSLLGHVYCKTDRLAKGSECYQKSLSLNPFLWSPFESLCEIGEKPDPDQTFKFTSLQNFSNCLPNSCTTQVPNHSLSHRQPETVLTETPQDTIELNRLNLESSNSKYSLNTDSSVSYIDSAVISPDTVPLGTGTSILSKQVQNKPKTGRSLLGGPAALSPLTPSFGILPLETPSPGDGSYLQNYTNTPPVIDVPSTGAPSKKSVARIGQTGTKSVFSQSGNSREVTPILAQTQSSGPQTSTTPQVLSPTITSPPNALPRRSSRLFTSDSSTTKENSKKLKMKFPPKIPNRKTKSKTNKGGITQPNINDSLEITKLDSSIISEGKISTITPQIQAFNLQKAAAGLMSLLREMGKGYLALCSYNCKEAINILSHLPSHHYNTGWVLCQIGRAYFELSEYMQAERIFSEVRRIENYRVEGMEIYSTTLWHLQKDVALSVLSKDLTDMDKNSPEAWCAAGNCFSLQREHDIAIKFFQRAIQVDPNYAYAYTLLGHEFVLTEELDKALACFRNAIRVNPRHYNAWYGLGMIYYKQEKFSLAEMHFQKALDINPQSSVLLCHIGVVQHALKKSEKALDTLNKAIVIDPKNPLCKFHRASVLFANEKYKSALQELEELKQIVPKESLVYFLIGKVYKKLGQTHLALMNFSWAMDLDPKGANNQIKEAIDKRYLPDDEEPITQEEQIMGTDESQESSMTDADDTQLHAAESDEF

SEQ ID NO: 281 - protein, 824 aa, Artificial Sequence
  CDC27/m__Homo_sapiens__P30260
MTVLQEPVQAAIWQALNHYAYRDAVFLAERLYAEVHSEEALFLLATCYYRSGKAYKAYRLLKGHSCTTPQCKYLLAKCCVDLSKLAEGEQILSGGVFNKQKSHDDIVTEFGDSACFTLSLLGHVYCKTDRLAKGSECYQKSLSLNPFLWSPFESLCEIGEKPDPDQTFKFTSLQNFSNCLPNSCTTQVPNHSLSHRQPETVLTETPQDTIELNRLNLESSNSKYSLNTDSSVSYIDSAVISPDTVPLGTGTSILSKQVQNKPKTGRSLLGGPAALSPLTPSFGILPLETPSPGDGSYLQNYTNTPPVIDVPSTGAPSKKSVARIGQTGTKSVFSQSGNSREVTPILAQTQSSGPQTSTTPQVLSPTITSPPNALPRRSSRLFTSDSSTTKENSKKLKMKFPPKIPNRKTKSKTNKGGITQPNINDSLEITKLDSSIISEGKISTITPQIQAFNLQKAAAEGLMSLLREMGKGYLALCSYNCKEAINILSHLPSHHYNTGWVLCQIGRAYFELSEYMQAERIFSEVRRIENYRVEGMEIYSTTLWHLQKDVALSVLSKDLTDMDKNSPEAWCAAGNCFSLQREHDIAIKFFQRAIQVDPNYAYAYTLLGHEFVLTEELDKALACFRNAIRVNPRHYNAWYGLGMIYYKQEKFSLAEMHFQKALDINPQSSVLLCHIGVVQHALKKSEKALDTLNKAIVIDPKNPLCKFHRASVLFANEKYKSALQELEELKQIVPKESLVYFLIGKVYKKLGQTHLALMNFSWAMDLDPKGANNQIKEAIDKRYLPDDEEPITQEEQIMGTDESQESSMTDADDTQLHAAESDEF

SEQ ID NO: 282 - protein, 595 aa, Artificial Sequence
  CDE30__Homo_sapiens__P28908
MRVLLAALGLLFLGALRAFPQDRPFEDTCHGNPSHYYDKAVRRCCYRCPMGLFPTQQCPQRPTDCRKQCEPDYYLDEADRCTACVTCSRDDLVEKTPCAWNSSRVCECRPGMFCSTSAVNSCARCFFHSVCPAGMIVKFPGTAQKNTVCEPASPGVSPACASPENCKEPSSGTIPQAKPTPVSPATSSASTMPVRGGTRLAQEAASKLTRAPDSPSSVGRPSSDPGLSPTQPCPEGSGDCRKQCEPDYYLDEAGRCTACVSCSRDDLVEKTPCAWNSSRTCECRPGMICATSATNSCARCVPYPICAAETVTKPQDMAEKDTTFEAPPLGTQPDCNPTPENGEAPASTSPTQSLLVDSQASKTLPIPTSAPVALSSTGKPVLDAGPVLFWVILVLVVVVGSSAFLLCHRRACRKRIRQKLHLCYPVQTSQPKLELVDSRPRRSSTQLRSGASVTEPVAEERGLMSQPLMETCHSVGAAYLESLPLQDASPAGGPSSPRDLPEPRVSTEHTNNKIEKIYIMKADTVIVGTVKAELPEGRGLAGPAEPELEEELEADHTPHYPEQETEPPLGSCSDVMLSVEEEGKEDPLPTAASGK

SEQ ID NO: 283 - protein, 303 aa, Artificial Sequence
  CDK4/m__Homo_sapiens__A0A024RBB6
MATSRYEPVAEIGVGAYGTVYKARDPHSGHFVALKSVRVPNGGGGGGGLPISTVREVALLRRLEAFEHPNVVRLMDVCATSRTDREIKVTLVFEHVDQDLRTYLDKAPPPGLPAETIKDLMRQFLRGLDFLHANCIVHRDLKPENILVTSGGTVKLADFGLARIYSYQMALTPVVVTLWYRAPEVLLQSTYATPVDMWSVGCIFAEMFRRKPLFCGNSEADQLGKIFDLIGLPPEDDWPRDVSLPRGAFPPRGPRPVQSVVPEMEESGAQLLLEMLTFNPHKRISAFRALQHSYLHKDEGNPE

SEQ ID NO: 284 - protein, 303 aa, Artificial Sequence; identical to SEQ ID NO: 283
  CDK4/m__Homo_sapiens__P11802

SEQ ID NO: 285 - protein, 229 aa, Artificial Sequence
  CDK4/m__Homo_sapiens__Q6LC83
MDVCATSRTDREIKVTLVFEHVDQDLRTYLDKAPPPGLPAETIKDLMRQFLRGLDFLHANCIVHRDLKPENILVTSGGTVKLADFGLARIYSYQMALTPVVVTLWYRAPEVLLQSTYATPVDMWSVGCIFAEMFRRKPLFCGNSEADQLGKIFDLIGLPPEDDWPRDVSLPRGAFPPRGPRPVQSVVPEMEESGAQLLLEMLTFNPHKRISAFRALQHSYLHKDEGNPE

SEQ ID NO: 286 - protein, 111 aa, Artificial Sequence
  CDK4/m__Homo_sapiens__Q96BE9
MATSRYEPVAEIGVGAYGTVYKARDPHSGHFVALKSVRVPNGGGGGGGLPISTVREVALLRRLEAFEHPNVVRLMDVCATSRTDREIKRCFVESLSSVETLKPTSWAKSLT

SEQ ID NO: 287 - protein, 142 aa, Artificial Sequence [sequence omitted]

SEQ ID NO: 288 - protein, 116 aa, Artificial Sequence
  CDKN2A/m__Homo_sapiens__G3XAG3
MEPAAGSSMEPSADWLATAAARGRVEEVRALLEAGALPNAPNSYGRRPIQVGRGSAAGAGDGGRLWRTKFAGELESGSASILRKKGRLPGEFSEGVCNHRPPPGDALGAWEAKEEE

SEQ ID NO: 289 - protein, 156 aa, Artificial Sequence
  CDKN2A/m__Homo_sapiens__K7PML8
MEPAAGSSMEPSADWLATAAARGRVEEVRALLEAGALPNAPNSYGRRPIQVMMMGSARVAELLLLHGAEPNCADPATLTRPVHDAAREGFLDTLVVLHRAGARLDVRDAWGRLPVDLAEELGHRDVARYLRAAAGGTRGSNHARIDAAEGPSDIPD

SEQ ID NO: 290 - protein, 108 aa, Artificial Sequence
  CDKN2A/m__Homo_sapiens__L8E941
MEVMMMGSARVAELLLLHGAEPNCADPATLTRPVHDAAREGFLDTLVVLHRAGARLDVRDAWGRLPVDLAEELGHRDVARYLRAAAGGTRGSNHARIDAAEGPSDIPD

SEQ ID NO: 291 - protein, 132 aa, Artificial Sequence
  CDKN2A/m__Homo_sapiens__Q8N726
MVRRFLVTLRIRRACGPPRVRVFVVHIPRLTGEWAAPGAPAAVALVLMLLRSQRLGQQPLPRRPGHDDGQRPSGGAAAAPRRGAQLRRPRHSHPTRARRCPGGLPGHAGGAAPGRGAAGRARCLGPSARGPG

SEQ ID NO: 292 - protein, 702 aa, Artificial Sequence
  CEA__Homo_sapiens__NP_004354
MESPSAPPHRWCIPWQRLLLTASLLTFWNPPTTAKLTIESTPFNVAEGKEVLLLVHNLPQHLFGYSWYKGERVDGNRQIIGYVIGTQQATPGPAYSGREIIYPNASLLIQNIIQNDTGFYTLHVIKSDLVNEEATGQFRVYPELPKPSISSNNSKPVEDKDAVAFTCEPETQDATYLWWVNNQSLPVSPRLQLSNGNRTLTLFNVTRNDTASYKCETQNPVSARRSDSVILNVLYGPDAPTISPLNTSYRSGENLNLSCHAASNPPAQYSWFVNGTFQQSTQELFIPNITVNNSGSYTCQAHNSDTGLNRTTVTTITVYAEPPKPFITSNNSNPVEDEDAVALTCEPEIQNTTYLWWVNNQSLPVSPRLQLSNDNRTLTLLSVTRNDVGPYECGIQNELSVDHSDPVILNVLYGPDDPTISPSYTYYRPGVNLSLSCHAASNPPAQYSWLIDGNIQQHTQELFISNITEKNSGLYTCQANNSASGHSRTTVKTITVSAELPKPSISSNNSKPVEDKDAVAFTCEPEAQNTTYLWWVNGQSLPVSPRLQLSNGNRTLTLFNVTRNDARAYVCGIQNSVSANRSDPVTLDVLYGPDTPIISPPDSSYLSGANLNLSCHSASNPSPQYSWRINGIPQQHTQVLFIAKITPNNNGTYACFVSNLATGRNNSIVKSITVSASGTSPGLSAGATVGIMIGVLVGVALI

SEQ ID NO: 293 - protein, 344 aa, Artificial Sequence
  CEAM6__Homo_sapiens__P40199
MGPPSAPPCRLHVPWKEVLLTASLLTFWNPPTTAKLTIESTPFNVAEGKEVLLLAHNLPQNRIGYSWYKGERVDGNSLIVGYVIGTQQATPGPAYSGRETIYPNASLLIQNVTQNDTGFYTLQVIKSDLVNEEATGQFHVYPELPKPSISSNNSNPVEDKDAVAFTCEPEVQNTTYLWWVNGQSLPVSPRLQLSNGNMTLTLLSVKRNDAGSYECEIQNPASANRSDPVTLNVLYGPDGPTISPSKANYRPGENLNLSCHAASNPPAQYSWFINGTFQQSTQELFIPNITVNNSGSYMCQAHNSATGLNRTTVTMITVSGSAPVLSAVATVGITIGVLARVALI

SEQ ID NO: 294 - protein, 390 aa, Artificial Sequence
  CH3L2__Homo_sapiens__Q15782
MGATTMDQKSLWAGVVVLLLLQGGSAYKLVCYFTNWSQDRQEPGKFTPENIDPFLCSHLIYSFASIENNKVIIKDKSEVMLYQTINSLKTKNPKLKILLSIGGYLFGSKGFHPMVDSSTSRLEFINSIILFLRNHNFDGLDVSWIYPDQKENTHFTVLIHELAEAFQKDFTKSTKERLLLTAGVSAGRQMIDNSYQVEKLAKDLDFINLLSFDFHGSWEKPLITGHNSPLSKGWQDRGPSSYYNVEYAVGYWIHKGMPSEKVVMGIPTYGHSFTLASAETTVGAPASGPGAAGPITESSGFLAYYEICQFLKGAKITRLQDQQVPYAVKGNQWVGYDDVKSMETKVQFLKNLNLGGAMIWSIDMDDFTGKSCNQGPYPLVQAVKRSLGSL

SEQ ID NO: 295 - protein, 943 aa, Artificial Sequence
  CLCA2__Homo_sapiens__Q9UQC9
MTQRSIAGPICNLKFVTLLVALSSELPFLGAGVQLQDNGYNGLLIAINPQVPENQNLISNIKEMITEASFYLFNATKRRVFFRNIKILIPATWKANNNSKIKQESYEKANVIVTDWYGAHGDDPYTLQYRGCGKEGKYIHFTPNFLLNDNLTAGYGSRGRVFVHEWAHLRWGVFDEYNNDKPFYINGQNQIKVTRCSSDITGIFVCEKGPCPQENCIISKLFKEGCTFIYNSTQNATASIMFMQSLSSVVEFCNASTHNQEAPNLQNQMCSLRSAWDVITDSADFHHSFPMNGTELPPPPTFSLVQAGDKVVCLVLDVSSKMAEADRLLQLQQAAEFYLMQIVEIHTFVGIASFDSKGEIRAQLHQINSNDDRKLLVSYLPTTVSAKTDISICSGLKKGFEVVEKLNGKAYGSVMILVTSGDDKLLGNCLPTVLSSGSTIHSIALGSSAAPNLEELSRLTGGLKFFVPDISNSNSMIDAFSRISSGTGDIFQQHIQLESTGENVKPHHQLKNTVTVDNTVGNDTMFLVTWQASGPPEIILFDPDGRKYYTNNFITNLTFRTASLWIPGTAKPGHWTYTLNNTHHSLQALKVTVTSRASNSAVPPATVEAFVERDSLHFPHPVMIYANVKQGFYPILNATVTATVEPETGDPVTLRLLDDGAGADVIKNDGIYSRYFFSFAANGRYSLKVHVNHSPSISTPAHSIPGSHAMYVPGYTANGNIQMNAPRKSVGRNEEERKWGFSRVSSGGSFSVLGVPAGPHPDVFPPCKIIDLEAVKVEEELTLSWTAPGEDFDQGQATSYEIRMSKSLQNIQDDFNNAILVNTSKRNPQQAGIREIFTFSPQISTNGPEHQPNGETHESHRIYVAIRAMDRNSLQSAVSNIAQAPLFIPPNSDPVPARDYLILKGVLTAMGLIGIICLIIVVTHHTLSRKKRADKKENGTKLL

SEQ ID NO: 296 - protein, 235 aa, Artificial Sequence
  CML28__Homo_sapiens__Q9NQT4
MEEETHTDAKIRAENGTGSSPRGPGCSLRHFACEQNLLSRPDGSASFLQGDTSVLAGVYGPAEVKVSKEIFNKATLEVILRPKIGLPGVAEKSRERLIRNTCEAVVLGTLHPRTSITVVLQVVSDAGSLLACCLNAACMALVDAGVPMRALFCGVACALDSDGTLVLDPTSKQEKEARAVLTFALDSVERKLLMSSTKGLYSDTELQQCLAAAQAASQHVFRFYRESLQRRYSKS

SEQ ID NO: 297 - protein, 583 aa, Artificial Sequence
  CML66__Homo_sapiens__Q96RS6
MEVAANCSLRVKRPLLDPRFEGYKLSLEPLPCYQLELDAAVAEVKLRDDQYTLEHMHAFGMYNYLHCDSWYQDSVYYIDTLGRIMNLTVMLDTALGKPREVFRLPTDLTACDNRLCASIHFSSSTWVTLSDGTGRLYVIGTGERGNSASEKWEIMFNEELGDPFIIIHSISLLNAEEHSIATLLLRIEKEELDMKGSGFYVSLEWVTISKKNQDNKKYEIIKRDILRGKSVPHYAAIEPDGNGLMIVSYKSLTFVQAGQDLEENMDEDISEKIKEPLYYWQQTEDDLTVTIRLPEDSTKEDIQIQFLPDHINIVLKDHQFLEGKLYSSIDHESSTWIIKESNSLEISLIKKNEGLTWPELVIGDKQGELIRDSAQCAAIAERLMHLTSEELNPNPDKEKPPCNAQELEECDIFFEESSSLCRFDGNTLKTTHVVNLGSNQYLFSVIVDPKEMPCFCLRHDVDALLWQPHSSKQDDMWEHIATFNALGYVQASKRDKKFFACAPNYSYAALCECLRRVFIYRQPAPMSTVLYNRKEGRQVGQVAKQQVASLETNDPILGFQATNERLFVLTTKNLFLIKVNTEN

SEQ ID NO: 298 - protein, 520 aa, Artificial Sequence
  COA-1/m__Homo_sapiens__Q5T124
MSSPLASLSKTRKVPLPSEPMNPGRRGIRIYGDEDEVDMLSDGCGSEEKISVPSCYGGIGAPVSRQVPASHDSELMAFMTRKLWDLEQQVKAQTDEILSKDQKIAALEDLVQTLRPHPAEATLQRQEELETMCVQLQRQVREMERFLSDYGLQWVGEPMDQEDSESKTVSEHGERDWMTAKKFWKPGDSLAPPEVDFDRLLASLQDLSELVVEGDTQVTPVPGGARLRTLEPIPLKLYRNGIMMFDGPFQPFYDPSTQRCLRDILDGFFPSELQRLYPNGVPFKVSDLRNQVYLEDGLDPFPGEGRVVGRQLMHKALDRVEEHPGSRMTAEKFLNRLPKFVIRQGEVIDIRGPIRDTLQNCCPLPARIQEIVVETPTLAAERERSQESPNTPAPPLSMLRIKSENGEQAFLLMMQPDNTIGDVRALLAQARVMDASAFEIFSTFPPTLYQDDTLTLQAAGLVPKAALLLRARRAPKSSLKFSPGPCPGPGPGPSPGPGPGPSPGPGPGPSPCPGPSPSPQ

SEQ ID NO: 299 - protein, 142 aa, Artificial Sequence
  coactosin-like_protein__Homo_sapiens__Q14019
MATKIDKEACRAAYNLVRDDGSAVIWVTFKYDGSTIVPGEQGAEYQHFIQQCTDDVRLFAFVRFTTGDAMSKRSKFALITWIGENVSGLQRAKTGTDKTLVKEVVQNFAKEFVISDRKELEEDFIKSELKKAGGANYDAQTE

SEQ ID NO: 300 - protein, 164 aa, Artificial Sequence
  collagen_XXIII__Homo_sapiens__L8EAS4
MATRDPWVWMASPDFQARKGKRVHQETLAPGETKDKMELLGLRGPLDLLGPGALLATLGKMAPGEHKAQRAPKESPDKTARWAQRDPQGPRVSLEYLERRATMGHQASLDHQGPRASQGAWGLGERTVWTVPQDRRGSLATEARMELQGPGVPQASRASRETQW

SEQ ID NO: 301 - protein, 540 aa, Artificial Sequence
  collagen_XXIII__Homo_sapiens__Q86Y22
MGPGERAGGGGDAGKGNAAGGGGGGRSATTAGSRAVSALCLLLSVGSAAACLLLGVQAAALQGRVAALEEERELLRRAGPPGALDAWAEPHLERLLREKLDGLAKIRTAREAPSECVCPPGPPGRRGKPGRRGDPGPPGQSGRDGYPGPLGLDGKPGLPGPKGEKGAPGDFGPRGDQGQDGAAGPPGPPGPPGARGPPGDTGKDGPRGAQGPAGPKGEPGQDGEMGPKGPPGPKGEPGVPGKKGDDGTPSQPGPPGPKGEPGSMGPRGENGVDGAPGPKGEPGHRGTDGAAGPRGAPGLKGEQGDTVVIDYDGRILDALKGPPGPQGPPGPPGIPGAKGELGLPGAPGIDGEKGPKGQKGDPGEPGPAGLKGEAGEMGLSGLPGADGLKGEKGESASDSLQESLAQLIVEPGPPGPPGPPGPMGLQGIQGPKGLDGAKGEKGASGERGPSGLPGPVGPPGLIGLPGTKGEKGRPGEPGLDGFPGPRGEKGDRSERGEKGERGVPGRKGVKGQKGEPGPPGLDQPCPVGPDGLPVPGCWHK

SEQ ID NO: 302 - protein, 163 aa, Artificial Sequence
  COX-2__Homo_sapiens__Q6ZYK7
MLARALLLCAVLALSHTANPCCSHPCQNRGVCMSVGFDQYKCDCTRTGFYGENCSTPEFLTRIKLFLKPTPNTVHYILTHFKGFWNVVNNIPFLRNAIMSYVLTSRSHLIDSPPTYNADYGYKSWEAFSNLSYYTRALPPVPDDCPTPLGVKALHASVFQDRS

SEQ ID NO: 303 - protein, 543 aa, Artificial Sequence
  CP1B1__Homo_sapiens__Q16678
MGTSLSPNDPWPLNPLSIQQTTLLLLLSVLATVHVGQRLLRQRRRQLRSAPPGPFAWPLIGNAAAVGQAAHLSFARLARRYGDVFQIRLGSCPIVVLNGERAIHQALVQQGSAFADRPAFASFRVVSGGRSMAFGHYSEHWKVQRRAAHSMMRNFFTRQPRSRQVLEGHVLSEARELVALLVRGSADGAFLDPRPLTVVAVANVMSAVCFGCRYSHDDPEFRELLSHNEEFGRTVGAGSLVDVMPWLQYFPNPVRTVFREFEQLNRNFSNFILDKFLRHCESLRPGAAPRDMMDAFILSAEKKAAGDSHGGGARLDLENVPATITDIFGASQDTLSTALQWLLLLFTRYPDVQTRVQAELDQVVGRDRLPCMGDQPNLPYVLAFLYEAMRFSSFVPVTIPHATTANTSVLGYHIPKDTVVFVNQWSVNHDPLKWPNPENFDPARFLDKDGLINKDLTSRVMIFSVGKRRCIGEELSKMQLFLFISILAHQCDFRANPNEPAKMNFSYGLTIKPKSFKVNVTLRESMELLDSAVQNLQAKETCQ

SEQ ID NO: 304 - protein, 110 aa, Artificial Sequence
  CSAG2__Homo_sapiens__Q9Y5P2-2
MWMGLIQLVEGVKRKDQGFLEKEFYHKTNIKMRCEFLACWPAFTVLGEAWRDQVDWSRLLRDAGLVKMSRKPRASSPLSNNHPPTPKRFPRQPGREKGPIKEVPGTKGSP

SEQ ID NO: 305 - protein, 127 aa, Artificial Sequence
  CSAG2__Homo_sapiens__Q9Y5P2
MWMGLIQLVEGVKRKDQGFLEKEFYHKTNIKMRCEFLACWPAFTVLGEAWRDQVDWSRLLRDAGLVKMSRKPRASSPLSNNHPPTPKRRGSGRHPLNPGPEALSKFPRQPGREKGPIKEVPGTKGSP

SEQ ID NO: 306 - protein, 189 aa, Artificial Sequence
  CT45A1__Homo_sapiens__Q5HYN5
MTDKTEKVAVDPETVFKRPRECDSPSYQKRQRMALLARKQGAGDSLIAGSAMSKAKKLMTGHAIPPSQLDSQIDDFTGFSKDRMMQKPGSNAPVGGNVTSSFSGDDLECRETASSPKSQREINADIKRKLVKELRCVGQKYEKIFEMLEGVQGPTAVRKRFFESIIKEAARCMRRDFVKHLKKKLKRMI

SEQ ID NO: 307 - protein, 264 aa, Artificial Sequence
  CT55__Homo_sapiens__Q8WUE5
MLRLLRLALAFYGRTADPAERQGPQQQGLPQGDTQLTTVQGVVTSFCGDYGMIDESIYFSSDVVTGNVPLKVGQKVNVVVEEDKPHYGLRAIKVDVVPRHLYGAGPSDSGTRVLIGCVTSINEDNIYISNSIYFSIAIVSEDFVPYKGDLLEVEYSTEPGISNIKATSVKPIRCIHTEEVCITSVHGRNGVIDYTIFFTLDSVKLPDGYVPQVDDIVNVVMVESIQFCFIWRAISITPVHKSSSGFQDDGGLGRPKRERRSQSI

SEQ ID NO: 308 - protein, 947 aa, Artificial Sequence
  CT-_9/BRD6__Homo_sapiens__Q58F21
MSLPSRQTAIIVNPPPPEYINTKKNGRLTNQLQYLQKVVLKDLWKHSFSWPFQRPVDAVKLQLPDYYTIIKNPMDLNTIKKRLENKYYAKASECIEDFNTMFSNCYLYNKPGDDIVLMAQALEKLFMQKLSQMPQEEQVVGVKERIKKGTQQNIAVSSAKEKSSPSATEKVFKQQEIPSVFPKTSISPLNVVQGASVNSSSQTAAQVTKGVKRKADTTTPATSAVKASSEFSPTFTEKSVALPPIKENMPKNVLPDSQQQYNVVKTVKVTEQLRHCSEILKEMLAKKHFSYAWPFYNPVDVNALGLHNYYDVVKNPMDLGTIKEKMDNQEYKDAYKFAADVRLMFMNCYKYNPPDHEVVTMARMLQDVFETHFSKIPIEPVESMPLCYIKTDITETTGRENTNEASSEGNSSDDSEDERVKRLAKLQEQLKAVHQQLQVLSQVPFRKLNKKKEKSKKEKKKEKVNNSNENPRKMCEQMRLKEKSKRNQPKKRKQQFIGLKSEDEDNAKPMNYDEKRQLSLNINKLPGDKLGRVVHIIQSREPSLSNSNPDEIEIDFETLKASTLRELEKYVSACLRKRPLKPPAKKIMMSKEELHSQKKQELEKRLLDVNNQLNSRKRQTKSDKTQPSKAVENVSRLSESSSSSSSSSESESSSSDLSSSDSSDSESEMFPKFTEVKPNDSPSKENVKKMKNECIPPEGRTGVTQIGYCVQDTTSANTTLVHQTTPSHVMPPNHHQLAFNYQELEHLQTVKNISPLQILPPSGDSEQLSNGITVMHPSGDSDTTMLESECQAPVQKDIKIKNADSWKSLGKPVKPSGVMKSSDELFNQFRKAAIEKEVKARTQELIRKHLEQNTKELKASQENQRDLGNGLTVESFSNKIQNKCSGEEQKEHQQSSEAQDKSKLWLLKDRDLARQKEQERRRREAMVGTIDMTLQSDIMTMFENNFD

SEQ ID NO: 309 - protein, 180 aa, Artificial Sequence
  CTAG2_Isoform_LAGE-1A__Homo_sapiens__O75638-2
MQAEGRGTGGSTGDADGPGGPGIPDGPGGNAGGPGEAGATGGRGPRGAGAARASGPRGGAPRGPHGGAASAQDGRCPCGARRPDSRLLELHITMPFSSPMEAELVRRILSRDAAPLPRPGAVLKDFTVSGNLLFIRLTAADHRQLQLSISSCLQQLSLLMWITQCFLPVFLAQAPSGQRR

SEQ ID NO: 310 - protein, 210 aa, Artificial Sequence; identical to SEQ ID NO: 191
  CTAG2_Isoform_LAGE-1B__Homo_sapiens__O75638

SEQ ID NO: 311 - protein, 663 aa, Artificial Sequence
  CTCFL__Homo_sapiens__Q8NI51
MAATEISVLSEQFTKIKELELMPEKGLKEEEKDGVCREKDHRSPSELEAERTSGAFQDSVLEEEVELVLAPSEESEKYILTLQTVHFTSEAVELQDMSLLSIQQQEGVQVVVQQPGPGLLWLEEGPRQSLQQCVAISIQQELYSPQEMEVLQFHALEENVMVASEDSKLAVSLAETTGLIKLEEEQEKNQLLAERTKEQLFFVETMSGDERSDEIVLTVSNSNVEEQEDQPTAGQADAEKAKSTKNQRKTKGAKGTFHCDVCMFTSSRMSSFNRHMKTHTSEKPHLCHLCLKTFRTVTLLRNHVNTHTGTRPYKCNDCNMAFVTSGELVRHRRYKHTHEKPFKCSMCKYASVEASKLKRHVRSHTGERPFQCCQCSYASRDTYKLKRHMRTHSGEKPYECHICHTRFTQSGTMKIHILQKHGENVPKYQCPHCATIIARKSDLRVHMRNLHAYSAAELKCRYCSAVFHERYALIQHQKTHKNEKRFKCKHCSYACKQERHMTAHIRTHTGEKPFTCLSCNKCFRQKQLLNAHFRKYHDANFIPTVYKCSKCGKGFSRWINLHRHSEKCGSGEAKSAASGKGRRTRKRKQTILKEATKGQKEAAKGWKEAANGDEAAAEEASTTKGEQFPGEMFPVACRETTARVKEEVDEGVTCEMLLNTMDK

SEQ ID NO: 312 - protein, 715 aa, Artificial Sequence
  Cten__Homo_sapiens__Q8IZW8
MSQVMSSPLLAGGHAVSLAPCDEPRRTLHPAPSPSLPPQCSYYTTEGWGAQALMAPVPCMGPPGRLQQAPQVEAKATCFLPSPGEKALGTPEDLDSYIDFSLESLNQMILELDPTFQLLPPGTGGSQAELAQSTMSMRKKEESEALDIKYIEVTSARSRCHDGPQHCSSPSVTPPFGSLRSGGLLLSRDVPRETRSSSESLIFSGNQGRGHQRPLPPSEGLSPRPPNSPSISIPCMGSKASSPHGLGSPLVASPRLEKRLGGLAPQRGSRISVLSASPVSDVSYMFGSSQSLLHSSNSSHQSSSRSLESPANSSSSLHSLGSVSLCTRPSDFQAPRNPTLTMGQPRTPHSPPLAKEHASSCPPSITNSMVDIPIVLINGCPEPGSSPPQRTPGHQNSVQPGAASPSNPCPATRSNSQTLSDAPFTTCPEGPARDMQPTMKFVMDTSKYWFKPNITREQAIELLRKEEPGAFVIRDSSSYRGSFGLALKVQEVPASAQSRPGEDSNDLIRHFLIESSAKGVHLKGADEEPYFGSLSAFVCQHSIMALALPCKLTIPQRELGGADGASDSTDSPASCQKKSAGCHTLYLSSVSVETLTGALAVQKAISTTFERDILPTPTVVHFKVTEQGITLTDVQRKVFFRRHYPLTTLRFCGMDPEQRKWQKYCKPSWIFGFVAKSQTEPQENVCHLFAEYDMVQPASQVIGLVTALLQDAERM

SEQ ID NO: 313 - protein, 433 aa, Artificial Sequence
  cyclin_B1__Homo_sapiens__P14635
MALRVTRNSKINAENKAKINMAGAKRVPTAPAATSKPGLRPRTALGDIGNKVSEQLQAKMPMKKEAKPSATGKVIDKKLPKPLEKVPMLVPVPVSEPVPEPEPEPEPEPVKEEKLSPEPILVDTASPSPMETSGCAPAEEDLCQAFSDVILAVNDVDAEDGADPNLCSEYVKDIYAYLRQLEEEQAVRPKYLLGREVTGNMRAILIDWLVQVQMKFRLLQETMYMTVSIIDRFMQNNCVPKKMLQLVGVTAMFIASKYEEMYPPEIGDFAFVTDNTYTKHQIRQMEMKILRALNFGLGRPLPLHFLRRASKIGEVDVEQHTLAKYLMELTMLDYDMVHFPPSQIAAGAFCLALKILDNGEWTPTLQHYLSYTEESLLPVMQHLAKNVVMVNQGLTKHMTVKNKYATSKHAKISTLPQLNSALVQDLAKAVAKV

SEQ ID NO: 314 - protein, 295 aa, Artificial Sequence
  cyclin_D1__Homo_sapiens__P24385
MEHQLLCCEVETIRRAYPDANLLNDRVLRAMLKAEETCAPSVSYFKCVQKEVLPSMRKIVATWMLEVCEEQKCEEEVFPLAMNYLDRFLSLEPVKKSRLQLLGATCMFVASKMKETIPLTAEKLCIYTDNSIRPEELLQMELLLVNKLKWNLAAMTPHDFIEHFLSKMPEAEENKQIIRKHAQTFVALCATDVKFISNPPSMVAAGSVVAAVQGLNLRSPNNFLSYYRLTRFLSRVIKCDPDCLRACQEQIEALLESSLRQAQQNMDPKAAEEEEEEEEEVDLACTPTDVRDVDI

SEQ ID NO: 315 - protein, 216 aa, Artificial Sequence
  cyp-B__Homo_sapiens__P23284
MLRLSERNMKVLLAAALIAGSVFFLLLPGPSAADEKKKGPKVTVKVYFDLRIGDEDVGRVIFGLFGKTVPKTVDNFVALATGEKGFGYKNSKFHRVIKDFMIQGGDFTRGDGTGGKSIYGERFPDENFKLKHYGPGWVSMANAGKDTNGSQFFITTVKTAWLDGKHVVFGKVLEGMEVVRKVESTKTDSRDKPLKDVIIADCGKIEVEKPFAIAKE

SEQ ID NO: 316 - protein, 347 aa, Artificial Sequence
  DAM-10__Homo_sapiens__P43366
MPRGQKSKLRAREKRRKAREETQGLKVAHATAAEKEECPSSSPVLGDTPTSSPAAGIPQKPQGAPPTTTAAAAVSCTESDEGAKCQGEENASFSQATTSTESSVKDPVAWEAGMLMHFILRKYKMREPIMKADMLKVVDEKYKDHFTEILNGASRRLELVFGLDLKEDNPSGHTYTLVSKLNLTNDGNLSNDWDFPRNGLLMPLLGVIFLKGNSATEEEIWKFMNVLGAYDGEEHLIYGEPRKFITQDLVQEKYLKYEQVPNSDPPRYQFLWGPRAYAETTKMKVLEFLAKMNGATPRDFPSHYEEALRDEEERAQVRSSVRARRRTTATTFRARSRAPFSRSSHPM

SEQ ID NO: 317 - protein, 811 aa, Artificial Sequence
  DEP1A__Homo_sapiens__Q5TB30
MESQGVPPGPYRATKLWNEVTTSFRAGMPLRKHRQHFKKYGNCFTAGEAVDWLYDLLRNNSNFGPEVTRQQTIQLLRKFLKNHVIEDIKGRWGSENVDDNNQLFRFPATSPLKTLPRRYPELRKNNIENFSKDKDSIFKLRNLSRRTPKRHGLHLSQENGEKIKHEIINEDQENAIDNRELSQEDVEEVWRYVILIYLQTILGVPSLEEVINPKQVIPQYIMYNMANTSKRGVVILQNKSDDLPHWVLSAMKCLANWPRSNDMNNPTYVGFERDVFRTIADYFLDLPEPLLTFEYYELFVNILVVCGYITVSDRSSGIHKIQDDPQSSKFLHLNNLNSFKSTECLLLSLLHREKNKEESDSTERLQISNPGFQERCAKKMQLVNLRNRRVSANDIMGGSCHNLIGLSNMHDLSSNSKPRCCSLEGIVDVPGNSSKEASSVFHQSFPNIEGQNNKLFLESKPKQEFLLNLHSEENIQKPFSAGFKRTSTLTVQDQEELCNGKCKSKQLCRSQSLLLRSSTRRNSYINTPVAEIIMKPNVGQGSTSVQTAMESELGESSATINKRLCKSTIELSENSLLPASSMLTGTQSLLQPHLERVAIDALQLCCLLLPPPNRRKLQLLMRMISRMSQNVDMPKLHDAMGTRSLMIHTFSRCVLCCAEEVDLDELLAGRLVSFLMDHHQEILQVPSYLQTAVEKHLDYLKKGHIENPGDGLFAPLPTYSYCKQISAQEFDEQKVSTSQAAIAELLENIIKNRSLPLKEKRKKLKQFQKEYPLIYQKRFPTTESEAALFGDKPTIKQPMLILRKPKFRSLR

SEQ ID NO: 318 - protein, 98 aa, Artificial Sequence
  E7__Human_papillomavirus_type_16__P03129
MHGDTPTLHEYMLDLQPETTDLYCYEQLNDSSEEEDEIDGPAGQAEPDRAHYNIVTFCCKCDSTLRLCVQSTHVDIRTLEDLLMGTLGIVCPICSQKP

SEQ ID NO: 319 - protein, 105 aa, Artificial Sequence
  E7__Human_papillomavirus_type_18__P06788
MHGPKATLQDIVLHLEPQNEIPVDLLCHEQLSDSEEENDEIDGVNHQHLPARRAEPQRHTMLCMCCKCEARIKLVVESSADDLRAFQQLFLNTLSFVCPWCASQQ

SEQ ID NO: 320 - protein, 98 aa, Artificial Sequence
  E7__Human_papillomavirus_type_31__P17387
MRGETPTLQDYVLDLQPEATDLHCYEQLPDSSDEEDVIDSPAGQAEPDTSNYNIVTFCCQCKSTLRLCVQSTQVDIRILQELLMGSFGIVCPNCSTRL

SEQ ID NO: 321 - protein, 97 aa, Artificial Sequence
  E7__Human_papillomavirus_type_33__P06429
MRGHKPTLKEYVLDLYPEPTDLYCYEQLSDSSDEDEGLDRPDGQAQPATADYYIVTCCHTCNTTVRLCVNSTASDLRTIQQLLMGTVNIVCPTCAQQ

SEQ ID NO: 322 - protein, 99 aa, Artificial Sequence
  E7__Human_papillomavirus_type_35__P27230
MHGEITTLQDYVLDLEPEATDLYCYEQLCDSSEEEEDTIDGPAGQAKPDTSNYNIVTSCCKCEATLRLCVQSTHIDIRKLEDLLMGTFGIVCPGCSQRA

SEQ ID NO: 323 - protein, 109 aa, Artificial Sequence
  E7__Human_papillomavirus_type_39__P24837
MRGPKPTLQEIVLDLCPYNEIQPVDLVCHEQLGESEDEIDEPDHAVNHQHQLLARRDEPQRHTIQCSCCKCNNTLQLVVEASRDTLRQLQQLFMDSLGFVCPWCATANQ

SEQ ID NO: 324 - protein, 106 aa, Artificial Sequence
  E7__Human_papillomavirus_type_45__P21736
MHGPRETLQEIVLHLEPQNELDPVDLLCYEQLSESEEENDEADGVSHAQLPARRAEPQRHKILCVCCKCDGRIELTVESSAEDLRTLQQLFLSTLSFVCPWCATNQ

SEQ ID NO: 325 - protein, 101 aa, Artificial Sequence
  E7__Human_papillomavirus_type_51__P26558
MRGNVPQLKDVVLHLTPQTEIDLQCYEQFDSSEEEDEVDNMRDQLPERRAGQATCYRIEAPCCRCSSVVQLAVESSGDTLRVVQQMLMGELSLVCPCCANN

SEQ ID NO: 326 - protein, 99 aa, Artificial Sequence
  E7__Human_papillomavirus_type_52__P36831
MRGDKATIKDYILDLQPETTDLHCYEQLGDSSDEEDTDGVDRPDGQAEQATSNYYIVTYCHSCDSTLRLCIHSTATDLRTLQQMLLGTLQVVCPGCARL

SEQ ID NO: 327 - protein, 105 aa, Artificial Sequence
  E7__Human_papillomavirus_type_56__P36833
MHGKVPTLQDVVLELTPQTEIDLQCNEQLDSSEDEDEDEVDHLQERPQQARQAKQHTCYLIHVPCCECKFVVQLDIQSTKEDLRVVQQLLMGALTVTCPLCASSN

SEQ ID NO: 328 - protein, 98 aa, Artificial Sequence
  E7__Human_papillomavirus_type_58__Q9QCZ1
MRGNNPTLREYILDLHPEPTDLFCYEQLCDSSDEDEIGLDRPDGQAQPATANYYIVTCCYTCDTTVRLCINSTTTDVRTLQQLLMGTCTIVCPSCAQQ

SEQ ID NO: 329 - protein, 107 aa, Artificial Sequence
  E7__Human_papillomavirus_type_59__Q81965
MHGPKATLCDIVLDLEPQNYEEVDLVCYEQLPDSDSENEKDEPDGVNHPLLLARRAEPQRHNIVCVCCKCNNQLQLVVETSQDGLRALQQLFMDTLSFVCPLCAANQ

SEQ ID NO: 330 - protein, 105 aa, Artificial Sequence
  E7__Human_papillomavirus_type_66__Q80956
MHGKVPTLQEVILELAPQTEIDLQCNEQLDSSEDEDEDEIDHLLERPQQARQAEQHKCYLIHVPCCKCELVVQLDIQSTKEELRVVQQLLMGALTVTCPLCASSK

SEQ ID NO: 331 - protein, 463 aa, Artificial Sequence
  EF1A2__Homo_sapiens__Q05639
MGKEKTHINIVVIGHVDSGKSTTTGHLIYKCGGIDKRTIEKFEKEAAEMGKGSFKYAWVLDKLKAERERGITIDISLWKFETTKYYITIIDAPGHRDFIKNMITGTSQADCAVLIVAAGVGEFEAGISKNGQTREHALLAYTLGVKQLIVGVNKMDSTEPAYSEKRYDEIVKEVSAYIKKIGYNPATVPFVPISGWHGDNMLEPSPNMPWFKGWKVERKEGNASGVSLLEALDTILPPTRPTDKPLRLPLQDVYKIGGIGTVPVGRVETGILRPGMVVTFAPVNITTEVKSVEMHHEALSEALPGDNVGFNVKNVSVKDIRRGNVCGDSKSDPPQEAAQFTSQVIILNHPGQISAGYSPVIDCHTAHIACKFAELKEKIDRRSGKKLEDNPKSLKSGDAAIVEMVPGKPMCVESFSQYPPLGRFAVRDMRQTVAVGVIKNVEKKSGGAGKVTKSAQKAQKAGK

SEQ ID NO: 332 - protein, 972 aa, Artificial Sequence
  EFTUD2/m__Homo_sapiens__Q15029
MDTDLYDEFGNYIGPELDSDEDDDELGRETKDLDEMDDDDDDDDVGDHDDDHPGMEVVLHEDKKYYPTAEEVYGPEVETIVQEEDTQPLTEPIIKPVKTKKFTLMEQTLPVTVYEMDFLADLMDNSELIRNVTLCGHLHHGKTCFVDCLIEQTHPEIRKRYDQDLCYTDILFTEQERGVGIKSTPVTVVLPDTKGKSYLFNIMDTPGHVNFSDEVTAGLRISDGVVLFIDAAEGVMLNTERLIKHAVQERLAVTVCINKIDRLILELKLPPTDAYYKLRHIVDEVNGLISMYSTDENLILSPLLGNVCFSSSQYSICFTLGSFAKIYADTFGDINYQEFAKRLWGDIYFNPKTRKFTKKAPTSSSQRSFVEFILEPLYKILAQVVGDVDTSLPRTLDELGIHLTKEELKLNIRPLLRLVCKKFFGEFTGFVDMCVQHIPSPKVGAKPKIEHTYTGGVDSDLGEAMSDCDPDGPLMCHTTKMYSTDDGVQFHAFGRVLSGTIHAGQPVKVLGENYTLEDEEDSQICTVGRLWISVARYHIEVNRVPAGNWVLIEGVDQPIVKTATITEPRGNEEAQIFRPLKFNTTSVIKIAVEPVNPSELPKMLDGLRKVNKSYPSLTTKVEESGEHVILGTGELYLDCVMHDLRKMYSEIDIKVADPVVTFCETVVETSSLKCFAETPNKKNKITMIAEPLEKGLAEDIENEVVQITWNRKKLGEFFQTKYDWDLLAARSIWAFGPDATGPNILVDDTLPSEVDKALLGSVKDSIVQGFQWGTREGPLCDELIRNVKFKILDAVVAQEPLHRGGGQIIPTARRVVYSAFLMATPRLMEPYYFVEVQAPADCVSAVYTVLARRRGHVTQDAPIPGSPLYTIKAFIPAIDSFGFETDLRTHTQGQAFSLSVFHHWQIVPGDPLDKSIVIRPLEPQPAPHLAREFMIKTRRRKGLSEDVSISKFFDDPMLLELAKQDVVLNYPM

SEQ ID NO: 333 - protein, 657 aa, Artificial Sequence
  EGFR__Homo_sapiens__A0A0B4J1Y5
MRPSGTAGAALLALLAALCPASRALEEKKVCQGTSNKLTQLGTFEDHFLSLQRMFNNCEVVLGNLEITYVQRNYDLSFLKTIQEVAGYVLIALNTVERIPLENLQIIRGNMYYENSYALAVLSNYDANKTGLKELPMRNLQEILHGAVRFSNNPALCNVESIQWRDIVSSDFLSNMSMDFQNHLGSCQKCDPSCPNGSCWGAGEENCQKLTKIICAQQCSGRCRGKSPSDCCHNQCAAGCTGPRESDCLVCRKFRDEATCKDTCPPLMLYNPTTYQMDVNPEGKYSFGATCVKKCPRNYVVTDHGSCVRACGADSYEMEEDGVRKCKKCEGPCRKVCNGIGIGEFKDSLSINATNIKHFKNCTSISGDLHILPVAFRGDSFTHTPPLDPQELDILKTVKEITGFLLIQAWPENRTDLHAFENLEIIRGRTKQHGQFSLAVVSLNITSLGLRSLKEISDGDVIISGNKNLCYANTINWKKLFGTSGQKTKIISNRGENSCKATGQVCHALCSPEGCWGPEPRDCVSCRNVSRGRECVDKCNLLEGEPREFVENSECIQCHPECLPQAMNITCTGRGPDNCIQCAHYIDGPHCVKTCPAGVMGENNTLVWKYADAGHVCHLCHPNCTYGCTGPGLEGCPTNGSYIVSHFPRSFYKMSVH

SEQ ID NO: 334 - protein, 1136 aa, Artificial Sequence
  EGFR__Homo_sapiens__E7BSV0
MRPSGTAGAALLALLAALCPASRALEEKKVCQGTSNKLTQLGTFEDHFLSLQRMFNNCEVVLGNLEITYVQRNYDLSFLKTIQEVAGYVLIALNTVERIPLENLQIIRGNMYYENSYALAVLSNYDANKTGLKELPMRNLQEILHGAVRFSNNPALCNVESIQWRDIVSSDFLSNMSMDFQNHLGSCQKCDPSCPNGSCWGAGEENCQKLTKIICAQQCSGRCRGKSPSDCCHNQCAAGCTGPRESDCLVCRKFRDEATCKDTCPPLMLYNPTTYQMDVNPEGKYSFGATCVKKCPRNYVVTDHGSCVRACGADSYEMEEDGVRKCKKCEGPCRKVCNGIGIGEFKDSLSINATNIKHFKNCTSISGDLHILPVAFRGDSFTHTPPLDPQELDILKTVKEITGFLLIQAWPENRTDLHAFENLEIIRGRTKQHGQFSLAVVSLNITSLGLRSLKEISDGDVIISGNKNLCYANTINWKKLFGTSGQKTKIISNRGENSCKATGQVCHALCSPEGCWGPEPRDCVSCRNVSRGRECVDKCNLLEGEPREFVENSECIQCHPECLPQAMNITCTGRGPDNCIQCAHYIDGPHCVKTCPAGVMGENNTLVWKYADAGHVCHLCHPNCTYGCTGPGLEGCPTNGPKIPSIATGMVGALLLLLVVALGIGLFMRRRHIVRKRTLRRLLQERELVEPLTPSGEAPNQALLRILKETEFKKIKVLGSGAFGTVYKGLWIPEGEKVKIPVAIKELREATSPKANKEILDEAYVMASVDNPHVCRLLGICLTSTVQLITQLMPFGCLLDYVREHKDNIGSQYLLNWCVQIAKGMNYLEDRRLVHRDLAARNVLVKTPQHVKITDFGLAKLLGAEEKEYHAEGGKVPIKWMALESILHRIYTHQSDVWSYGVTVWELMTFGSKPYDGIPASEISSILEKGERLPQPPICTIDVYMIMVKCWMIDADSRPKFRELIIEFSKMARDPQRYLVIQGDERMHLPSPTDSNFYRALMDEEDMDDVVDADEYLIPQQGFFSSPSTSRTPLLSSLSATSNNSTVACIDRNGLQSCPIKEDSFLQRYSSDPTGALTEDSIDDTFLPVPGEWLVWKQSCSSTSSTHSAAASLQCPSQVLPPASPEGETVADLQTQ

SEQ ID NO: 335 - protein, 49 aa, Artificial Sequence
  EGFR__Homo_sapiens__L0R6G1
MCATCAIQTAPTGPNKSSLSDFSLPLKLHFLSTISISPFASNKVLTLFI

SEQ ID NO: 336 - protein, 405 aa, Artificial Sequence
  EGFR__Homo_sapiens__P00533-2
MRPSGTAGAALLALLAALCPASRALEEKKVCQGTSNKLTQLGTFEDHFLSLQRMFNNCEVVLGNLEITYVQRNYDLSFLKTIQEVAGYVLIALNTVERIPLENLQIIRGNMYYENSYALAVLSNYDANKTGLKELPMRNLQEILHGAVRFSNNPALCNVESIQWRDIVSSDFLSNMSMDFQNHLGSCQKCDPSCPNGSCWGAGEENCQKLTKIICAQQCSGRCRGKSPSDCCHNQCAAGCTGPRESDCLVCRKFRDEATCKDTCPPLMLYNPTTYQMDVNPEGKYSFGATCVKKCPRNYVVTDHGSCVRACGADSYEMEEDGVRKCKKCEGPCRKVCNGIGIGEFKDSLSINATNIKHFKNCTSISGDLHILPVAFRGDSFTHTPPLDPQELDILKTVKEITGLS

SEQ ID NO: 337 - protein, 1210 aa, Artificial Sequence [sequence omitted]

SEQ ID NO: 338 - protein, 464 aa, Artificial Sequence [sequence omitted]

SEQ ID NO: 339 - protein, 1091 aa, Artificial Sequence
  EGFR__Homo_sapiens__Q504U8
MRPSGTAGAALLALLAALCPASRALEEKKVCQGTSNKLTQLGTFEDHFLSLQRMFNNCEVVLGNLEITYVQRNYDLSFLKTIQEVAGYVLIALNTVERIPLENLQIIRGNMYYENSYALAVLSNYDANKTGLKELPMRNLQGQKCDPSCPNGSCWGAGEENCQKLTKIICAQQCSGRCRGKSPSDCCHNQCAAGCTGPRESDCLVCRKFRDEATCKDTCPPLMLYNPTTYQMDVNPEGKYSFGATCVKKCPRNYVVTDHGSCVRACGADSYEMEEDGVRKCKKCEGPCRKVCNGIGIGEFKDSLSINATNIKHFKNCTSISGDLHILPVAFRGDSFTHTPPLDPQELDILKTVKEITGFLLIQAWPENRTDLHAFENLEIIRGRTKQHGQFSLAVVSLNITSLGLRSLKEISDGDVIISGNKNLCYANTINWKKLFGTSGQKTKIISNRGENSCKATGQVCHALCSPEGCWGPEPRDCVSCRNVSRGRECVDKCNLLEGEPREFVENSECIQCHPECLPQAMNITCTGRGPDNCIQCAHYIDGPHCVKTCPAGVMGENNTLVWKYADAGHVCHLCHPNCTYGCTGPGLEGCPTNGPKIPSIATGMVGALLLLLVVALGIGLFMRRRHIVRKRTLRRLLQERELVEPLTPSGEAPNQALLRILKETEFKKIKVLGSGAFGTVYKGLWIPEGEKVKIPVAIKELREATSPKANKEILDEAYVMASVDNPHVCRLLGICLTSTVQLITQLMPFGCLLDYVREHKDNIGSQYLLNWCVQIAKGMNYLEDRRLVHRDLAARNVLVKTPQHVKITDFGLAKLLGAEEKEYHAEGGKVPIKWMALESILHRIYTHQSDVWSYGVTVWELMTFGSKPYDGIPASEISSILEKGERLPQPPICTIDVYMIMVKCWMIDADSRPKFRELIIEFSKMARDPQRYLVIQGDERMHLPSPTDSNFYRALMDEEDMDDVVDADEYLIPQQGFFSSPSTSRTPLLSSLSATSNNSTVACIDRNGLQSCPIKEDSFLQRYSSDPTGALTEDSIDDTFLPVPGEWLVWKQSCSSTSSTHSAAASLQCPSQVLPPASPEGETVADLQTQ

SEQ ID NO: 340 - protein, 71 aa, Artificial Sequence
  EGFR__Homo_sapiens__Q8NDU8
MRPSGTAGAALLALLAALCPASRALEEKKGKGVSRRLPRRPRIAPRTPQPAQPRTGAPARARAPARPFLFP

SEQ ID NO: 341 - protein, 239 aa, Artificial Sequence
  EGLN3__Homo_sapiens__Q9H6Z9
MPLGHIMRLDLEKIALEYIVPCLHEVGFCYLDNFLGEVVGDCVLERVKQLHCTGALRDGQLAGPRAGVSKRHLRGDQITWIGGNEEGCEAISFLLSLIDRLVLYCGSRLGKYYVKERSKAMVACYPGNGTGYVRHVDNPNGDGRCITCIYYLNKNWDAKLHGGILRIFPEGKSFIADVEPIFDRLLFFWSDRRNPHEVQPSYATRYAMTVWYFDAEERAEAKKKFRNLTRKTESALTED

SEQ ID NO: 342 - protein, 521 aa, Artificial Sequence
  ELF2/m__Homo_sapiens__B7Z720
MATSLHEGPTNQLDLLIRAVEASVHSSNAHCTDKTIEAAEALLHMESPTCLRDSRSPEFIHAAMRPDVITETVVEVSTEESEPMDTSPIPTSPDSHEPMKKKKVGRKPKTQQSPISNGSPELGIKKKPREGKGNTTYLWEFLLDLLQDKNTCPRYIKWTQREKGIFKLVDSKAVSKLWGKHKNKPDMNYETMGRALRYYYQRGILAKVEGQRLVYQFKDMPKNIVVIDDDKSETCNEDLAGTTDEKSLERVSLSAESLLKAASSVRSGKNSSPINCSRAEKGVARVVNITSPGHDASSRSPTTTASVSATAAPRTVRVAMQVPVVMTSLGQKISTVAVQSVNAGAPLITSTSPTTATSPKVVIQTIPTVMPASTENGDKITMQPAKIITIPATQLAQCQLQTKSNLTGSGSINIVGTPLAVRALTPVSIAHGTPVMRLSMPTQQASGQTPPRVISAVIKGPEVKSEAVAKKQEHDVKTLQLVEEKPADGNKTVTHVVVVSAPSAIALPVTMKTEGLVTCEK

SEQ ID NO: 343 - protein, 269 aa, Artificial Sequence
  EMMPRIN__Homo_sapiens__Q54A51
MAAALFVLLGFALLGTHGASGAAGTVFTTVEDLGSKILLTCSLNDSATEVTGHRWLKGGVVLKEDALPGQKTEFKVDSDDQWGEYSCVFLPEPMGTANIQLHGPPRVKAVKSSEHINEGETAMLVCKSESVPPVTDWAWYKITDSEDKALMNGSESRFFVSSSQGRSELHIENLNMEADPGQYRCNGTSSKGSDQAIITLRVRSHLAALWPFLGIVAEVLVLVTIIFIYEKRRKPEDVLDDDDAGSAPLKSSGQHQNDKGKNVRQRNSS

SEQ ID NO: 344 - protein, 314 aa, Artificial Sequence
  EpCam__Homo_sapiens__P16422
MAPPQVLAFGLLLAAATATFAAAQEECVCENYKLAVNCFVNNNRQCQCTSVGAQNTVICSKLAAKCLVMKAEMNGSKLGRRAKPEGALQNNDGLYDPDCDESGLFKAKQCNGTSMCWCVNTAGVRRTDKDTEITCSERVRTYWIIIELKHKAREKPYDSKSLRTALQKEITTRYQLDPKFITSILYENNVITIDLVQNSSQKTQNDVDIADVAYYFEKDVKGESLFHSKKMDLTVNGEQLDLDPGQTLIYYVDEKAPEFSMQGLKAGVIAVIVVVVIAVVAGIVVLVISRKKRMAKYEKAEIKEMGEMHRELNA

SEQ ID NO: 345 - protein, 976 aa, Artificial Sequence
  EphA2__Homo_sapiens__P29317
MELQAARACFALLWGCALAAAAAAQGKEVVLLDFAAAGGELGWLTHPYGKGWDLMQNIMNDMPIYMYSVCNVMSGDQDNWLRTNWVYRGEAERIFIELKFTVRDCNSFPGGASSCKETFNLYYAESDLDYGTNFQKRLFTKIDTIAPDEITVSSDFEARHVKLNVEERSVGPLTRKGFYLAFQDIGACVALLSVRVYYKKCPELLQGLAHFPETIAGSDAPSLATVAGTCVDHAVVPPGGEEPRMHCAVDGEWLVPIGQCLCQAGYEKVEDACQACSPGFFKFEASESPCLECPEHTLPSPEGATSCECEEGFFRAPQDPASMPCTRPPSAPHYLTAVGMGAKVELRWTPPQDSGGREDIVYSVTCEQCWPESGECGPCEASVRYSEPPHGLTRTSVTVSDLEPHMNYTFTVEARNGVSGLVTSRSFRTASVSINQTEPPKVRLEGRSTTSLSVSWSIPPPQQSRVWKYEVTYRKKGDSNSYNVRRTEGFSVTLDDLAPDTTYLVQVQALTQEGQGAGSKVHEFQTLSPEGSGNLAVIGGVAVGVVLLLVLAGVGFFIHRRRKNQRARQSPEDVYFSKSEQLKPLKTYVDPHTYEDPNQAVLKFTTEIHPSCVTRQKVIGAGEFGEVYKGMLKTSSGKKEVPVAIKTLKAGYTEKQRVDFLGEAGIMGQFSHHNIIRLEGVISKYKPMMIITEYMENGALDKFLREKDGEFSVLQLVGMLRGIAAGMKYLANMNYVHRDLAARNILVNSNLVCKVSDFGLSRVLEDDPEATYTTSGGKIPIRWTAPEAISYRKFTSASDVWSFGIVMWEVMTYGERPYWELSNHEVMKAINDGFRLPTPMDCPSAIYQLMMQCWQQERARRPKFADIVSILDKLIRAPDSLKTLADFDPRVSIRLPSTSGSEGVPFRTVSEWLESIKMQQYTEHFMAAGYTAIEKVVQMTNDDIKRIGVRLPGHQKRIAYSLLGLKDQVNTVGIPI

SEQ ID NO: 346 - protein, 983 aa, Artificial Sequence
  EphA3__Homo_sapiens__P29320
MDCQLSILLLLSCSVLDSFGELIPQPSNEVNLLDSKTIQGELGWISYPSHGWEEISGVDEHYTPIRTYQVCNVMDHSQNNWLRTNWVPRNSAQKIYVELKFTLRDCNSIPLVLGTCKETFNLYYMESDDDHGVKFREHQFTKIDTIAADESFTQMDLGDRILKLNTEIREVGPVNKKGFYLAFQDVGACVALVSVRVYFKKCPFTVKNLAMFPDTVPMDSQSLVEVRGSCVNNSKEEDPPRMYCSTEGEWLVPIGKCSCNAGYEERGFMCQACRPGFYKALDGNMKCAKCPPHSSTQEDGSMNCRCENNYFRADKDPPSMACTRPPSSPRNVISNINETSVILDWSWPLDTGGRKDVTFNIICKKCGWNIKQCEPCSPNVRFLPRQFGLTNTTVTVTDLLAHTNYTFEIDAVNGVSELSSPPRQFAAVSITTNQAAPSPVLTIKKDRTSRNSISLSWQEPEHPNGIILDYEVKYYEKQEQETSYTILRARGTNVTISSLKPDTIYVFQIRARTAAGYGTNSRKFEFETSPDSFSISGESSQVVMIAISAAVAIILLTVVIYVLIGRFCGYKSKHGADEKRLHFGNGHLKLPGLRTYVDPHTYEDPTQAVHEFAKELDATNISIDKVVGAGEFGEVCSGRLKLPSKKEISVAIKTLKVGYTEKQRRDFLGEASIMGQFDHPNIIRLEGVVTKSKPVMIVTEYMENGSLDSFLRKHDAQFTVIQLVGMLRGIASGMKYLSDMGYVHRDLAARNILINSNLVCKVSDFGLSRVLEDDPEAAYTTRGGKIPIRWTSPEAIAYRKFTSASDVWSYGIVLWEVMSYGERPYWEMSNQDVIKAVDEGYRLPPPMDCPAALYQLMLDCWQKDRNNRPKFEQIVSILDKLIRNPGSLKIITSAAARPSNLLLDQSNVDITTFRTTGDWLNGVWTAHCKEIFTGVEYSSCDTIAKISTDDMKKVGVTVVGPQKKIISSIKALETQSKNGPVPV

SEQ ID NO: 347 - protein, 983 aa, Artificial Sequence [sequence omitted]

SEQ ID NO: 348 - protein, 462 aa, Artificial Sequence
  ErbB3__Homo_sapiens__B3KWG5
MPMSTILPVTSPCLPATGVTVWELMTFGAEPYAGLRLAEVPDLLEKGERLAQPQICTIDVYMVMVKCWMIDENIRPTFKELANEFTRMARDPPRYLVIKRESGPGIAPGPEPHGLTNKKLEEVELEPELDLDLDLEAEEDNLATTTLGSALSLPVGTLNRPRGSQSLLSPSSGYMPMNQGNLGESCQESAVSGSSERCPRPVSLHPMPRGCLASESSEGHVTGSEAELQEKVSMCRSRSRSRSPRPRGDSAYHSQRHSLLTPVTPLSPPGLEEEDVNGYVMPDTHLKGTPSSREGTLSSVGLSSVLGTEEEDEDEEYEYMNRRRRHSPPHPPRPSSLEELGYEYMDVGSDLSASLGSTQSCPLHPVPIMPTAGTTPDEDYEYMNRQRDGGGPGGDYAAMGACPASEQGYEEMRAFQGPGHQAPHVHYARLKTLRSLEATDSAFDNPDYWHSRLFPKANAQRT

SEQ ID NO: 349 - protein, 921 aa, Artificial Sequence
  ErbB3__Homo_sapiens__B4DGQ7
MRANDALQVLGLLFSLARGSEVGNSQAVCPGTLNGLSVTGDAENQYQTLYKLYERCEVVMGNLEIVLTGHNADLSFLQWIREVTGYVLVAMNEFSTLPLPNLRVVRGTQVYDGKFAIFVMLNYNTNSSHALRQLRLTQLTEILSGGVYIEKNDKLCHMDTIDWRDIVRDRDAEIVVKDNGRSCPPCHEVCKGRCWGPGSEDCQTLTKTICAPQCNGHCFGPNPNQCCHDECAGGCSGPQDTDCFACRHFNDSGACVPRCPQPLVYNKLTFQLEPNPHTKYQYGGVCVASCPHNFVVDQTSCVRACPPDKMEVDKNGLKMCEPCGGLCPKACEGTGSGSRFQTVDSSNIDGFVNCTKILGNLDFLITGLNGDPWHKIPALDPEKLNVFRTVREITGYLNIQSWPPHMHNFSVFSNLTTIGGRSLYNRGFSLLIMKNLNVTSLGFRSLKEISAGRIYISANRQLCYHHSLNWTKVLRGPTEERLDIKHNRPRRDCVAEGKVCDPLCSSGGCWGPGPGQCLSCRNYSRGGVCVTHCNFLNGEPREFAHEAECFSCHPECQPMEGTATCNGSGSDTCAQCAHFRDGPHCVSSCPHGVLGAKGPIYKYPDVQNECRPCHENCTQGCKGPELQDCLGQTLVLIGKTHLTMALTVIAGLVVIFMMLGGTFLYWRGRRIQNKRAMRRYLERGESIEPLDPSEKANKVLARIFKETELRKLKVLGSGVFGTVHKGVWIPEGESIKIPVCIKVIEDKSGRQSFQAVTDHMLAIGSLDHAHIVRLLGLCPGSSLQLVTQYLPLGSLLDHVRQHRGALGPQLLLNWGVQIAKGMYYLEEHGMVHRNLAARNVLLKSPSQVQVADFGVADLLPPDDKQLLYSEAKTPIKWMALESIHFGKYTHQSDVWSYGQCIWMPSLPSLAPVSNLPFETPS

SEQ ID NO: 350 - protein, 1308 aa, Artificial Sequence
  ERBB4__Homo_sapiens__Q15303
MKPATGLWVWVSLLVAAGTVQPSDSQSVCAGTENKLSSLSDLEQQYRALRKYYENCEVVMGNLEITSIEHNRDLSFLRSVREVTGYVLVALNQFRYLPLENLRIIRGTKLYEDRYALAIFLNYRKDGNFGLQELGLKNLTEILNGGVYVDQNKFLCYADTIHWQDIVRNPWPSNLTLVSTNGSSGCGRCHKSCTGRCWGPTENHCQTLTRTVCAEQCDGRCYGPYVSDCCHRECAGGCSGPKDTDCFACMNFNDSGACVTQCPQTFVYNPTTFQLEHNFNAKYTYGAFCVKKCPHNFVVDSSSCVRACPSSKMEVEENGIKMCKPCTDICPKACDGIGTGSLMSAQTVDSSNIDKFINCTKINGNLIFLVTGIHGDPYNAIEAIDPEKLNVFRTVREITGFLNIQSWPPNMTDFSVFSNLVTIGGRVLYSGLSLLILKQQGITSLQFQSLKEISAGNIYITDNSNLCYYHTINWTTLFSTINQRIVIRDNRKAENCTAEGMVCNHLCSSDGCWGPGPDQCLSCRRFSRGRICIESCNLYDGEFREFENGSICVECDPQCEKMEDGLLTCHGPGPDNCTKCSHFKDGPNCVEKCPDGLQGANSFIFKYADPDRECHPCHPNCTQGCNGPTSHDCIYYPWTGHSTLPQHARTPLIAAGVIGGLFILVIVGLTFAVYVRRKSIKKKRALRRFLETELVEPLTPSGTAPNQAQLRILKETELKRVKVLGSGAFGTVYKGIWVPEGETVKIPVAIKILNETTGPKANVEFMDEALIMASMDHPHLVRLLGVCLSPTIQLVTQLMPHGCLLEYVHEHKDNIGSQLLLNWCVQIAKGMMYLEERRLVHRDLAARNVLVKSPNHVKITDFGLARLLEGDEKEYNADGGKMPIKWMALECIHYRKFTHQSDVWSYGVTIWELMTFGGKPYDGIPTREIPDLLEKGERLPQPPICTIDVYMVMVKCWMIDADSRPKFKELAAEFSRMARDPQRYLVIQGDDRMKLPSPNDSKFFQNLLDEEDLEDMMDAEEYLVPQAFNIPPPIYTSRARIDSNRSEIGHSPPPAYTPMSGNQFVYRDGGFAAEQGVSVPYRAPTSTIPEAPVAQGATAEIFDDSCCNGTLRKPVAPHVQEDSSTQRYSADPTVFAPERSPRGELDEEGYMTPMRDKPKQEYLNPVEENPFVSRRKNGDLQALDNPEYHNASNGPPKAEDEYVNEPLYLNTFANTLGKAEYLKNNILSMPEKAKKAFDNPDYWNHSLPPRSTLQHPDYLQEYSTKYFYKQNGRIRPIVAENPEYLSEFSLKPGTVLPPPPYRHRNTVV

SEQ ID NO: 351 - protein, 486 aa, Artificial Sequence
  ERG__Homo_sapiens__P11308
MIQTVPDPAAHIKEALSVVSEDQSLFECAYGTPHLAKTEMTASSSSDYGQTSKMSPRVPQQDWLSQPPARVTIKMECNPSQVNGSRNSPDECSVAKGGKMVGSPDTVGMNYGSYMEEKHMPPPNMTTNERRVIVPADPTLWSTDHVRQWLEWAVKEYGLPDVNILLFQNIDGKELCKMTKDDFQRLTPSYNADILLSHLHYLRETPLPHLTSDDVDKALQNSPRLMHARNTGGAAFIFPNTSVYPEATQRITTRPDLPYEPPRRSAWTGHGHPTPQSKAAQPSPSTVPKTEDQRPQLDPYQILGPTSSRLANPGSGQIQLWQFLLELLSDSSNSSCITWEGTNGEFKMTDPDEVARRWGERKSKPNMNYDKLSRALRYYYDKNIMTKVHGKRYAYKFDFHGIAQALQPHPPESSLYKYPSDLPYMGSYHAHPQKMNFVAPHPPALPVTSSSFFAAPNPYWNSPTGGIYPNTRLPTSHMPSHLGTYY

SEQ ID NO: 352 - protein, 452 aa, Artificial Sequence
  ETV6__Homo_sapiens__P41212
MSETPAQCSIKQERISYTPPESPVPSYASSTPLHVPVPRALRMEEDSIRLPAHLRLQPIYWSRDDVAQWLKWAENEFSLRPIDSNTFEMNGKALLLLTKEDFRYRSPHSGDVLYELLQHILKQRKPRILFSPFFHPGNSIHTQPEVILHQNHEEDNCVQRTPRPSVDNVHHNPPTIELLHRSRSPITTNHRPSPDPEQRPLRSPLDNMIRRLSPAERAQGPRPHQENNHQESYPLSVSPMENNHCPASSESHPKPSSPRQESTRVIQLMPSPIMHPLILNPRHSVDFKQSRLSEDGLHREGKPINLSHREDLAYMNHIMVSVSPPEEHAMPIGRIADCRLLWDYVYQLLSDSRYENFIRWEDKESKIFRIVDPNGLARLWGNHKNRTNMTYEKMSRALRHYYKLNIIRKEPGQRLLFRFMKTPDEIMSGRTDRLEHLESQELDEQIYQEDEC

SEQ ID NO: 353 - protein, 656 aa, Artificial Sequence
  EWS__Homo_sapiens__Q01844
MASTDYSTYSQAAAQQGYSAYTAQPTQGYAQTTQAYGQQSYGTYGQPTDVSYTQAQTTATYGQTAYATSYGQPPTGYTTPTAPQAYSQPVQGYGTGAYDTTTATVTTTQASYAAQSAYGTQPAYPAYGQQPAATAPTRPQDGNKPTETSQPQSSTGGYNQPSLGYGQSNYSYPQVPGSYPMQPVTAPPSYPPTSYSSTQPTSYDQSSYSQQNTYGQPSSYGQQSSYGQQSSYGQQPPTSYPPQTGSYSQAPSQYSQQSSSYGQQSSFRQDHPSSMGVYGQESGGFSGPGENRSMSGPDNRGRGRGGFDRGGMSRGGRGGGRGGMGSAGERGGFNKPGGPMDEGPDLDLGPPVDPDEDSDNSAIYVQGLNDSVTLDDLADFFKQCGVVKMNKRTGQPMIHIYLDKETGKPKGDATVSYEDPPTAKAAVEWFDGKDFQGSKLKVSLARKKPPMNSMRGGLPPREGRGMPPPLRGGPGGPGGPGGPMGRMGGRGGDRGGFPPRGPRGSRGNPSGGGNVQHRAGDWQCPNPGCGNQNFAWRTECNQCKAPKPEGFLPPPFPPPGGDRGRGGPGGMRGGRGGLMDRGGPGGMFRGGRGGDRGGFRGGRGMDRGGFGGGRRGGPGGPPGPLMEQMGGRRGGRGGPGKMDKGEHRQERRDRPY

SEQ ID NO: 354 - protein, 665 aa, Artificial Sequence
  EZH2__Homo_sapiens__F2YMM1
MGQTGKKSEKGPVCWRKRVKSEYMRLRQLKRFRRADEVKSMFSSNRQKILERTEILNQEWKQRRIQPVHILTSVSSLRGTREVEDETVLHNIPYMGDEVLDQDGTFIEELIKNYDGKVHGDRECGFINDEIFVELVNALGQYNDDDDDDDGDDPEEREEKQKDLEDHRDDKESRPPRKFPSDKIFEAISSMFPDKGTAEELKEKYKELTEQQLPGALPPECTPNIDGPNAKSVQREQSLHSFHTLFCRRCFKYDCFLHPFHATPNTYKRKNTETALDNKPCGPQCYQHLEGAKEFAAALTAERIKTPPKRPGGRRRGRLPNNSSRPSTPTINVLESKDTDSDREAGTETGGENNDKEEEEKKDETSSSSEANSRCQTPIKMKPNIEPPENVEWSGAEASMFRVLIGTYYDNFCAIARLIGTKTCRQVYEFRVKESSIIAPAPAEDVDTPPRKKKRKHRLWAAHCRKIQLKKGQNRFPGCRCKAQCNTKQCPCYLAVRECDPDLCLTCGAADHWDSKNVSCKNCSIQRGSKKHLLLAPSDVAGWGIFIKDPVQKNEFISEYCGEIISQDEADRRGKVYDKYMCSFLFNLNNDFVVDATRKGNKIRFANHSVNPNCYAKVMMVNGDHRIGIFAKRAIQTGEELFFDYRYSQADALKYVGIEREMEIP

SEQ ID NO: 355 - protein, 334 aa, Artificial Sequence
  EZH2__Homo_sapiens__G3XAL2
MGQTGKKSEKGPVCWRKRVKSEYMRLRQLKRFRRADEVKSMFSSNRQKILERTEILNQEWKQRRIQPVHILTSVSSLRGTRECSVTSDLDFPTQVIPLKTLNAVASVPIMYSWSPLQQNFMVEDETVLHNIPYMGDEVLDQDGTFIEELIKNYDGKVHGDRECGFINDEIFVELVNALGQYNDDDDDDDGDDPEEREEKQKDLEDHRDDKESRPPRKFPSDKIFEAISSMFPDKGTAEELKEKYKELTEQQLPGALPPECTPNIDGPNAKSVQREQSLHSFHTLFCRRCFKYDCFLHPFHATPNTYKRKNTETALDNKPCGPQCYQHLPLLPRN

SEQ ID NO: 356 - protein, 64 aa, Artificial Sequence
  EZH2__Homo_sapiens__L0R855
MPLVNIMMMTMMMMETILKKEKKSRKIWRITEMIKKAAHLGNFLLIKFLKPFPQCFQIRAQQKN

SEQ ID NO: 357 - protein, 746 aa, Artificial Sequence
  EZH2__Homo_sapiens__Q15910
MGQTGKKSEKGPVCWRKRVKSEYMRLRQLKRFRRADEVKSMFSSNRQKILERTEILNQEWKQRRIQPVHILTSVSSLRGTRECSVTSDLDFPTQVIPLKTLNAVASVPIMYSWSPLQQNFMVEDETVLHNIPYMGDEVLDQDGTFIEELIKNYDGKVHGDRECGFINDEIFVELVNALGQYNDDDDDDDGDDPEEREEKQKDLEDHRDDKESRPPRKFPSDKIFEAISSMFPDKGTAEELKEKYKELTEQQLPGALPPECTPNIDGPNAKSVQREQSLHSFHTLFCRRCFKYDCFLHPFHATPNTYKRKNTETALDNKPCGPQCYQHLEGAKEFAAALTAERIKTPPKRPGGRRRGRLPNNSSRPSTPTINVLESKDTDSDREAGTETGGENNDKEEEEKKDETSSSSEANSRCQTPIKMKPNIEPPENVEWSGAEASMFRVLIGTYYDNFCAIARLIGTKTCRQVYEFRVKESSIIAPAPAEDVDTPPRKKKRKHRLWAAHCRKIQLKKDGSSNHVYNYQPCDHPRQPCDSSCPCVIAQNFCEKFCQCSSECQNRFPGCRCKAQCNTKQCPCYLAVRECDPDLCLTCGAADHWDSKNVSCKNCSIQRGSKKHLLLAPSDVAGWGIFIKDPVQKNEFISEYCGEIISQDEADRRGKVYDKYMCSFLFNLNNDFVVDATRKGNKIRFANHSVNPNCYAKVMMVNGDHRIGIFAKRAIQTGEELFFDYRYSQADALKYVGIEREMEIP

SEQ ID NO: 358 - protein, 707 aa, Artificial Sequence
  EZH2__Homo_sapiens__S4S3R8
MGQTGKKSEKGPVCWRKRVKSEYMRLRQLKRFRRADEVKSMFSSNRQKILERTEILNQEWKQRRIQPVHILTSVSSLRGTREVEDETVLHNIPYMGDEVLDQDGTFIEELIKNYDGKVHGDRECGFINDEIFVELVNALGQYNDDDDDDDGDDPEEREEKQKDLEDHRDDKESRPPRKFPSDKIFEAISSMFPDKGTAEELKEKYKELTEQQLPGALPPECTPNIDGPNAKSVQREQSLHSFHTLFCRRCFKYDCFLHPFHATPNTYKRKNTETALDNKPCGPQCYQHLEGAKEFAAALTAERIKTPPKRPGGRRRGRLPNNSSRPSTPTINVLESKDTDSDREAGTETGGENNDKEEEEKKDETSSSSEANSRCQTPIKMKPNIEPPENVEWSGAEASMFRVLIGTYYDNFCAIARLIGTKTCRQVYEFRVKESSIIAPAPAEDVDTPPRKKKRKHRLWAAHCRKIQLKKDGSSNHVYNYQPCDHPRQPCDSSCPCVIAQNFCEKFCQCSSECQNRFPGCRCKAQCNTKQCPCYLAVRECDPDLCLTCGAADHWDSKNVSCKNCSIQRGSKKHLLLAPSDVAGWGIFIKDPVQKNEFISEYCGEIISQDEADRRGKVYDKYMCSFLFNLNNDFVVDATRKGNKIRFANHSVNPNCYAKVMMVNGDHRIGIFAKRAIQTGEELFFDYRYSQADALKYVGIEREMEIP

SEQ ID NO: 359 - protein, 132 aa, Artificial Sequence
  FABP7__Homo_sapiens__O15540
MVEAFCATWKLTNSQNFDEYMKALGVGFATRQVGNVTKPTVIISQEGDKVVIRTLSTFKNTEISFQLGEEFDETTADDRNCKSVVSLDGDKLVHIQKWDGKETNFVREIKDGKMVMTLTFGDVVAVRHYEKA

SEQ ID NO: 360 - protein, 254 aa, Artificial Sequence
  FCGR3A_Version_1__Homo_sapiens__P08637
MWQLLLPTALLLLVSAGMRTEDLPKAVVFLEPQWYRVLEKDSVTLKCQGAYSPEDNSTQWFHNESLISSQASSYFIDAATVDDSGEYRCQTNLSTLSDPVQLEVHIGWLLLQAPRWVFKEEDPIHLRCHSWKNTALHKVTYLQNGKGRKYFHHNSDFYIPKATLKDSGSYFCRGLFGSKNVSSETVNITITQGLAVSTISSFFPPGYQVSFCLVMVLLFAVDTGLYFSVKTNIRSSTRDWKDHKFKWRKDPQDK

SEQ ID NO: 361 - protein, 290 aa, Artificial Sequence
  FCGR3A_Version_2__Homo_sapiens__CCDS1232.1
MGGGAGERLFTSSCLVGLVPLGLRISLVTCPLQCGIMWQLLLPTALLLLVSAGMRTEDLPKAVVFLEPQWYRVLEKDSVTLKCQGAYSPEDNSTQWFHNESLISSQASSYFIDAATVDDSGEYRCQTNLSTLSDPVQLEVHIGWLLLQAPRWVFKEEDPIHLRCHSWKNTALHKVTYLQNGKGRKYFHHNSDFYIPKATLKDSGSYFCRGLFGSKNVSSETVNITITQGLAVSTISSFFPPGYQVSFCLVMVLLFAVDTGLYFSVKTNIRSSTRDWKDHKFKWRKDPQDK

SEQ ID NO: 362 - protein, 268 aa, Artificial Sequence
  FGF5__Homo_sapiens__P12034
MSLSFLLLLFFSHLILSAWAHGEKRLAPKGQPGPAATDRNPRGSSSRQSSSSAMSSSSASSSPAASLGSQGSGLEQSSFQWSPSGRRTGSLYCRVGIGFHLQIYPDGKVNGSHEANMLSVLEIFAVSQGIVGIRGVFSNKFLAMSKKGKLHASAKFTDDCKFRERFQENSYNTYASAIHRTEKTGREWYVALNKRGKAKRGCSPRVKPQHISTHFLPRFKQSEQPELSFTVTVPEKKKPPSPIKPKIPLSAPRKNTNSVKYRLKFRFG

SEQ ID NO: 363 - protein, 38 aa, Artificial Sequence
  FGF5__Homo_sapiens__Q60518
MSTRCGEAGRARGTQPHRGYRAQNQPYKMHLGPPRLEE

SEQ ID NO: 364 - protein, 821 aa, Artificial Sequence
  FGFR2__Homo_sapiens__P21802
MVSWGRFICLVVVTMATLSLARPSFSLVEDTTLEPEEPPTKYQISQPEVYVAAPGESLEVRCLLKDAAVISWTKDGVHLGPNNRTVLIGEYLQIKGATPRDSGLYACTASRTVDSETWYFMVNVTDAISSGDDEDDTDGAEDFVSENSNNKRAPYWTNTEKMEKRLHAVPAANTVKFRCPAGGNPMPTMRWLKNGKEFKQEHRIGGYKVRNQHWSLIMESVVPSDKGNYTCVVENEYGSINHTYHLDVVERSPHRPILQAGLPANASTVVGGDVEFVCKVYSDAQPHIQWIKHVEKNGSKYGPDGLPYLKVLKAAGVNTTDKEIEVLYIRNVTFEDAGEYTCLAGNSIGISFHSAWLTVLPAPGREKEITASPDYLEIAIYCIGVFLIACMVVTVILCRMKNTTKKPDFSSQPAVHKLTKRIPLRRQVTVSAESSSSMNSNTPLVRITTRLSSTADTPMLAGVSEYELPEDPKWEFPRDKLTLGKPLGEGCFGQVVMAEAVGIDKDKPKEAVTVAVKMLKDDATEKDLSDLVSEMEMMKMIGKHKNIINLLGACTQDGPLYVIVEYASKGNLREYLRARRPPGMEYSYDINRVPEEQMTFKDLVSCTYQLARGMEYLASQKCIHRDLAARNVLVTENNVMKIADFGLARDINNIDYYKKTTNGRLPVKWMAPEALFDRVYTHQSDVWSFGVLMWEIFTLGGSPYPGIPVEELFKLLKEGHRMDKPANCTNELYMMMRDCWHAVPSQRPTFKQLVEDLDRILTLTTNEEYLDLSQPLEQYSPSYPDTRSSCSSGDDSVFSPDPMPYEPCLPQYPHINGSVKT

SEQ ID NO: 365 - protein, 635 aa, Artificial Sequence
  fibronectin__Homo_sapiens__A0A024R5I6
MAPPLLLLLLASGAAACPLPCVCQNLSESLSTLCAHRGLLFVPPNVDRRTVELRLADNFIQALGPPDFRNMTGLVDLTLSRNAITRIGARAFGDLESLRSLHLDGNRLVELGTGSLRGPVNLQHLILSGNQLGRIAPGAFDDFLESLEDLDLSYNNLRQVPWAGIGAMPALHTLNLDHNLIDALPPGAFAQLGQLSRLDLTSNRLATLAPDPLFSRGRDAEASPAPLVLSFSGNPLHCNCELLWLRRLARPDDLETCASPPGLAGRYFWAVPEGEFSCEPPLIARHTQRLWVLEGQRATLRCRALGDPAPTMHWVGPDDRLVGNSSRARAFPNGTLEIGVTGAGDAGGYTCIATNPAGEATARVELRVLALPHGGNSSAEGGRPGPSDIAASARTAAEGEGTLESEPAVQVTEVTATSGLVSWGPGRPADPVWMFQIQYNSSEDETLIYRIVPASSHHFLLKHLVPGADYDLCLLALSPAAGPSDLTATRLLGCAHFSTLPASPLCHALQAHVLGGTLTVAVGGVLVAALLVFTVALLVRGRGAGNGRLPLKLSHVQSQTNGGPSPTPKAHPPRSPPPRPQRSCSLDLGDAGCYGYARRLGGAWARRSHSVHGGLLGAGCRGVGGSAERLEESVV

SEQ ID NO: 366 - protein, 1098 aa, Artificial Sequence
  fibronectin__Homo_sapiens__A0A024RB01
MPPRQPPRQAGGGLSREFGKLLPALSHSPLGGLGSGSGSVAPGQGRAGAMGSRTPESPLHAVQLRWGPRRRPPLLPLLLLLLPPPPRVGGFNLDAEAPAVLSGPPGSFFGFSVEFYRPGTDGVSVLVGAPKANTSQPGVLQGGAVYLCPWGASPTQCTPIEFDSKGSRLLESSLSSSEGEEPVEYKSLQWFGATVRAHGSSILACAPLYSWRTEKEPLSDPVGTCYLSTDNFTRILEYAPCRSDFSWAAGQGYCQGGFSAEFTKTGRVVLGGPGSYFWQGQILSATQEQIAESYYPEYLINLVQGQLQTRQASSIYDDSYLGYSVAVGEFSGDDTEDFVAGVPKGNLTYGYVTILNGSDIRSLYNFSGEQMASYFGYAVAATDVNGDGLDDLLVGAPLLMDRTPDGRPQEVGRVYVYLQHPAGIEPTPTLTLTGHDEFGRFGSSLTPLGDLDQDGYNDVAIGAPFGGETQQGVVFVFPGGPGGLGSKPSQVLQPLWAASHTPDFFGSALRGGRDLDGNGYPDLIVGSFGVDKAVVYRGRPIVSASASLTIFPAMFNPEERSCSLEGNPVACINLSFCLNASGKHVADSIGFTVELQLDWQKQKGGVRRALFLASRQATLTQTLLIQNGAREDCREMKIYLRNESEFRDKLSPIHIALNFSLDPQAPVDSHGLRPALHYQSKSRIEDKAQILLDCGEDNICVPDLQLEVFGEQNHVYLGDKNALNLTFHAQNVGEGGAYEAELRVTAPPEAEYSGLVRHPGNFSSLSCDYFAVNQSRLLVCDLGNPMKAGASLWGGLRFTVPHLRDTKKTIQFDFQILSKNLNNSQSDVVSFRLSVEAQAQVTLNGVSKPEAVLFPVSDWHPRDQPQKEEDLGPAVHHVYELINQGPSSISQGVLELSCPQALEGQQLLYVTRVTGLNCTTNHPINPKGLELDPEGSLHHQQKREAPSRSSASSGPQILKCPEAECFRLRCELGPLHQQESQSLQLHFRVWAKTFLQREHQPFSLQCEAVYKALKMPYRILPRQLPQKERQVATAVQWTKAEGSYGVPLWIIILAILFGLLLLGLLIYILYKLGFFKRSLPYGTAMEKAQLKPPATSDA

SEQ ID NO: 367 - protein, 1198 aa, Artificial Sequence
  fibronectin__Homo_sapiens__A0A024RDT9
MAEHPPLLDTTQILSSDISLLSAPIVSADGTQQVILVQVNPGEAFTIRREDGQFQCITGPAQVPMMSPNGSVPPIYVPPGYAPQVIEDNGVRRVVVVPQAPEFHPGSHTVLHRSPHPPLPGFIPVPTMMPPPPRHMYSPVTGAGDMTTQYMPQYQSSQVYGDVDAHSTHGRSNFRDERSSKTYERLQKKLKDRQGTQKDKMSSPPSSPQKCPSPINEHNGLIKGQIAGGINTGSAKIKSGKGKGGTQVDTEIEEKDEETKAFEALLSNIVKPVASDIQARTVVLTWSPPSSLINGETDESSVPELYGYEVLISSTGKDGKYKSVYVGEETNITLNDLKPAMDYHAKVQAEYNSIKGTPSEAEIFTTLSCEPDIPNPPRIANRTKNSLTLQWKAPSDNGSKIQNFVLEWDEGKGNGEFCQCYMGSQKQFKITKLSPAMGCKFRLSARNDYGTSGFSEEVLYYTSGCAPSMPASPVLTKAGITWLSLQWSKPSGTPSDEGISYILEMEEETSGYGFKPKYDGEDLAYTVKNLRRSTKYKFKVIAYNSEGKSNPSEVVEFTTCPDKPGIPVKPSVKGKIHSHSFKITWDPPKDNGGATINKYVVEMAEGSNGNKWEMIYSGATREHLCDRLNPGCFYRLRVYCISDGGQSAVSESLLVQTPAVPPGPCLPPRLQGRPKAKEIQLRWGPPLVDGGSPISCYSVEMSPIEKDEPREVYQGSEVECTVSSLLPGKTYSFRLRAANKMGFGPFSEKCDITTAPGPPDQCKPPQVTCRSATCAQVNWEVPLSNGTDVTEYRLEWGGVEGSMQICYCGPGLSYEIKGLSPATTYYCRVQALSVVGAGPFSEVVACVTPPSVPGIVTCLQEISDDEIENPHYSPSTCLAISWEKPCDHGSEILAYSIDFGDKQSLTVGKVTSYIINNLQPDTTYRIRIQALNSLGAGPFSHMIKLKTKPLPPDPPRLECVAFSHQNLKLKWGEGTPKTLSTDSIQYHLQMEDKNGRFVSLYRGPCHTYKVQRLNESTSYKFCIQACNEAGEGPLSQEYIFTTPKSVPAALKAPKIEKVNDHICEITWECLQPMKGDPVIYSLQVMLGKDSEFKQIYKGPDSSFRYSSLQLNCEYRFRVCAIRQCQDSLGHQDLVGPYSTTVLFISQRTEPPASTNRDTVESTRTRRALSDEQCAAVILVLFAFFSILIAFIIQYFVIK

SEQ ID NO: 368 - protein, 1142 aa, Artificial Sequence
  fibronectin__Homo_sapiens__A0A024RDV5
MSGPAQVPMMSPNGSVPPIYVPPGYAPQVIEDNGVRRVVVVPQAPEFHPGSHTVLHRSPHPPLPGFIPVPTMMPPPPRHMYSPVTGAGDMTTQYMPQYQSSQVYGDVDAHSTHGRSNFRDERSSKTYERLQKKLKDRQGTQKDKMSSPPSSPQKCPSPINEHNGLIKGQIAGGINTGSAKIKSGKGKGGTQVDTEIEEKDEETKAFEALLSNIVKPVASDIQARTVVLTWSPPSSLINGETDESSVPELYGYEVLISSTGKDGKYKSVYVGEETNITLNDLKPAMDYHAKVQAEYNSIKGTPSEAEIFTTLSCEPDIPNPPRIANRTKNSLTLQWKAPSDNGSKIQNFVLEWDEGKGNGEFCQCYMGSQKQFKITKLSPAMGCKFRLSARNDYGTSGFSEEVLYYTSGCAPSMPASPVLTKAGITWLSLQWSKPSGTPSDEGISYILEMEEETSGYGFKPKYDGEDLAYTVKNLRRSTKYKFKVIAYNSEGKSNPSEVVEFTTCPDKPGIPVKPSVKGKIHSHSFKITWDPPKDNGGATINKYVVEMAEGSNGNKWEMIYSGATREHLCDRLNPGCFYRLRVYCISDGGQSAVSESLLVQTPAVPPGPCLPPRLQGRPKAKEIQLRWGPPLVDGGSPISCYSVEMSPIEKDEPREVYQGSEVECTVSSLLPGKTYSFRLRAANKMGFGPFSEKCDITTAPGPPDQCKPPQVTCRSATCAQVNWEVPLSNGTDVTEYRLEWGGVEGSMQICYCGPGLSYEIKGLSPATTYYCRVQALSVVGAGPFSEVVACVTPPSVPGIVTCLQEISDDEIENPHYSPSTCLAISWEKPCDHGSEILAYSIDFGDKQSLTVGKVTSYIINNLQPDTTYRIRIQALNSLGAGPFSHMIKLKTKPLPPDPPRLECVAFSHQNLKLKWGEGTPKTLSTDSIQYHLQMEDKNGRFVSLYRGPCHTYKVQRLNESTSYKFCIQACNEAGEGPLSQEYIFTTPKSVPAALKAPKIEKVNDHICEITWECLQPMKGDPVIYSLQVMLGKDSEFKQIYKGPDSSFRYSSLQLNCEYRFRVCAIRQCQDSLGHQDLVGPYSTTVLFISQRTEPPASTNRDTVESTRTRRALSDEQCAAVILVLFAFFSILIAFIIQYFVIK

SEQ ID NO: 369 - protein, 339 aa, Artificial Sequence
  fibronectin__Homo_sapiens__A6NH44
MPPSKPHPPVVGKVTHHSIELYWDLEKKAKRQGPQEQWFRFSIEEEDPKMHTYGIIYTGYATKHVVEGLEPRTLYRFRLKVTSPSGECEYSPLVSVSTTREPISSEHLHRAVSVNDEDLLVRILQGGRVKVDVPNKFGFTALMVAAQKGYTRLVKILVSNGTDVNLKNGSGKDSLMLACYAGHLDVVKYLRRHGASWQARDLGGCTALHWAADGGHCSVIEWMIKDGCEVDVVDTGSGWTPLMRVSAVSGNQRVASLLIDAGANVNVKDRNGKTPLMVAVLNNHEELVQLLLDKGADASVKNEFGKGVLEMARVFDRQSVVSLLEERKKKQRPKKSCVC

SEQ ID NO: 370 - protein, 1049 aa, Artificial Sequence [sequence omitted]

SEQ ID NO: 371 - protein, 1049 aa, Artificial Sequence [sequence omitted]

SEQ ID NO: 372 - protein, 466 aa, Artificial Sequence
  fibronectin__Homo_sapiens__B3KXM5
MLSLRQRMMHARFRNPLSRQPARPSYRQGYNGRPNVEGKVLPGSNGKPNGQRIINGPQGTKWVVDLDRGLVLNAEGRYLQDSHGNPLRIKLGGDGRTIVDLEGTPVVSPDGLPLFGQGRHGTPLANAQDKPILSLGGKPLVGLEVIKKTTHPPTTTMQPTTTTTPLPTTTTPRPTTATTRRTTTRRPTTTVRTTTRTTTTTTPKPTTPIPTCPPGTLERHDDDGNLIMSSNGIPECYAEEDEFSGLETDTAVPTEEAYVIYDEDYEFETSRPPTTTEPSTTATTPRVIPEEGAISSFPEEEFDLAGRKRFVAPYVTYLNKDPSAPCSLTDALDHFQVDSLDEIIPNDLKKSDLPPQHAPRNITVVAVEGCHSFVIVDWDKATPGDVVTGYLVYSASYEDFIRNKWSTQASSVTHLPIENLKPNTRYYFKVQAQNPHGYGPISPSVSFVTESDNPLLVVRPPGGEPI

SEQ ID NO: 373 - protein, 156 aa, Artificial Sequence
  fibronectin__Homo_sapiens__B4DIC5
MEEQRNEEIQSFIYSLKQMLLNVEANSAKVQEDLEAEFQSLFSLLEELKEGMLMKIKQDRASRTYELQNQLAACTRALESSEELLETANQTLQAMDSEDFPQAAKQIKDGVTMAPAFRLSLKAKVSDNMSHLMVDFAQERQMLQALKFLPGERGTH

SEQ ID NO: 374 - protein, 306 aa, Artificial Sequence
  fibronectin__Homo_sapiens__B4DN21
MIFEEHGFRRTTPPTTATPIRHRPRPYPPNVGQEALSQTTISWAPFQDTSEYIISCHPVGTDEEPLQFRVPGTSTSATLTGLTRGATYNIIVEALKDQQRHKVREEVVTVGNSVNEGLNQPTDDSCFDPYTVSHYAVGDEWERMSESGFKLLCQCLGFGSGHFRCDSSRWCHDNGVNYKIGEKWDRQGENGQMMSCTCLGNGKGEFKCDPHEATCYDDGKTYHVGEQWQKEYLGAICSCTCFGGQRGWRCDNCRRPGGEPSPEGTTGQSYNQYSQRYHQRTNTNVNCPIECFMPLDVQADREDSRE

SEQ ID NO: 375 - protein, 639 aa, Artificial Sequence [sequence omitted]

SEQ ID NO: 376 - protein, 337 aa, Artificial Sequence [sequence omitted]

SEQ ID NO: 377 - protein, 1014 aa, Artificial Sequence [sequence omitted]

SEQ ID NO: 378 - protein, 894 aa, Artificial Sequence [sequence omitted]

SEQ ID NO: 379 - protein, 383 aa, Artificial Sequence
  fibronectin__Homo_sapiens__B7Z3W5
MASAFRLSLKPKVSDNMTHLMVDFSQERQMLQTLKFLPVPKAPEIDPVECLVADNSVTVAWRMPEEDNKIDHFILEHRKTNFDGLPRVKDERCWEIIDNIKGTEYTLSGLKFDSKYMNFRVRACNKAVAGEYSDPVTLETKALNFNLDNSSSHLNLKVEDTCVEWDPTGGKGQESKIKGKENKGSVHVTSLKKHTSGTPSPKRTSVGSRPPAVRGSRDRFTGESYTVLGDTAIESGQHYWEVKAQKDCKSYSVGVAYKTLGKFDQLGKTNTSWCIHVNNWLQNTFAAKHNNKVKALDVTVPEKIGVFCDFDGGQLSFYDANSKQLLYSFKTKFTQPVLPGFMVWCGGLSLSTGMQVPSAVRTLQKSENGMTGSASSLNNVVTQ

SEQ ID NO: 380 - protein, 146 aa, Artificial Sequence
  fibronectin__Homo_sapiens__B7Z939
MPPSKPHPPVVGKVTHHSIELYWDLEKKAKRQGPQEQWFRFSIEEEDPKMHTYGIIYTGYATKHVVEGLEPRTLYRFRLKVTSPSGECEYSPLVSVSTTSEYSDRPHSPLSRSMEMTSNLEKIFCLSFGLTRSRNDTIFKHCNNIC

SEQ ID NO: 381 - protein, 684 aa, Artificial Sequence
  fibronectin__Homo_sapiens__G5E9X3
MAEHPPLLDTTQILSSDISLLSAPIVSADGTQQVILVQVNPGEAFTIRREDGQFQCITGPAQVPMMSPNGSVPPIYVPPGYAPQVIEDNGVRRVVVVPQAPEFHPGSHTVLHRSPHPPLPGFIPVPTMMPPPPRHMYSPVTGAGDMTTQYMPQYQSSQVYGDVDAHSTHGRSNFRDERSSKTYERLQKKLKDRQGTQKDKMSSPPSSPQKCPSPINEHNGLIKGQIAGGINTGSAKIKSGKGKGGTQVDTEIEEKDEETKAFEALLSNIVKPVASDIQARTVVLTWSPPSSLINGETDESSVPELYGYEVLISSTGKDGKYKSVYVGEETNITLNDLKPAMDYHAKVQAEYNSIKGTPSEAEIFTTLSCEPDIPNPPRIANRTKNSLTLQWKAPSDNGSKIQNFVLEWDEGKGNGEFCQCYMGSQKQFKITKLSPAMGCKFRLSARNDYGTSGFSEEVLYYTSGCAPSMPASPVLTKAGITWLSLQWSKPSGTPSDEGISYILEMEEETSGYGFKPKYDGEDLAYTVKNLRRSTKYKFKVIAYNSEGKSNPSEVVEFTTCPDKPGIPVKPSVKGKIHSHSFKITWDPPKDNGGATINKYVVEMAEGSNGNKWEMIYSGATREHLCDRLNPGCFYRLRVYCISDGGQSAVSESLLVQTPAVPPGPCLPPRLQGRPKAKEIQTPSG

SEQ ID NO: 382 - protein, 163 aa, Artificial Sequence
  fibronectin__Homo_sapiens__Q9H382
MSESGFKLLCQCLGFGSGHFRCDSSRWCHDNGVNYKIGEKWDRQGENGQMMSCTCLGNGKGEFKCDPHEATCYDDGKTYHVGEQWQKEYLGAICSCTCFGGQRGWRCDNCRRPGGEPSPEGTTGQSYNQYSQRYHQRTNTNVNCPIECFMPLDVQADREDSRE

SEQ ID NO: 383 - protein, 380 aa, Artificial Sequence
  FOS__Homo_sapiens__P01100
MMFSGFNADYEASSSRCSSASPAGDSLSYYHSPADSFSSMGSPVNAQDFCTDLAVSSANFIPTVTAISTSPDLQWLVQPALVSSVAPSQTRAPHPFGVPAPSAGAYSRAGVVKTMTGGRAQSIGRRGKVEQLSPEEEEKRRIRRERNKMAAAKCRNRRRELTDTLQAETDQLEDEKSALQTEIANLLKEKEKLEFILAAHRPACKIPDDLGFPEEMSVASLDLTGGLPEVATPESEEAFTLPLLNDPEPKPSVEPVKSISSMELKTEPFDDFLFPASSRPSGSETARSVPDMDLSGSFYAADWEPLHSGSLGMGPMATELEPLCTPVVTCTPSCTAYTSSFVFTYPEADSFPSCAAAHRKGSSSNEPSSDSLSSPTLLAL

SEQ ID NO: 384 - protein, 431 aa, Artificial Sequence
  FOXP3__Homo_sapiens__Q9BZS1
MPNPRPGKPSAPSLALGPSPGASPSWRAAPKASDLLGARGPGGTFQGRDLRGGAHASSSSLNPMPPSQLQLPTLPLVMVAPSGARLGPLPHLQALLQDRPHFMHQLSTVDAHARTPVLQVHPLESPAMISLTPPTTATGVFSLKARPGLPPGINVASLEWVSREPALLCTFPNPSAPRKDSTLSAVPQSSYPLLANGVCKWPGCEKVFEEPEDFLKHCQADHLLDEKGRAQCLLQREMVQSLEQQLVLEKEKLSAMQAHLAGKMALTKASSVASSDKGSCCIVAAGSQGPVVPAWSGPREAPDSLFAVRRHLWGSHGNSTFPEFLHNMDYFKFHNMRPPFTYATLIRWAILEAPEKQRTLNEIYHWFTRMFAFFRNHPATWKNAIRHNLSLHKCFVRVESEKGAVWTVDELEFRKKRSQRPSRCSNPTPGP

SEQ ID NO: 385 - protein, 365 aa, Artificial Sequence
  FUT1__Homo_sapiens__P19526
MWLRSHRQLCLAFLLVCVLSVIFFLHIHQDSFPHGLGLSILCPDRRLVTPPVAIFCLPGTAMGPNASSSCPQHPASLSGTWTVYPNGRFGNQMGQYATLLALAQLNGRRAFILPAMHAALAPVFRITLPVLAPEVDSRTPWRELQLHDWMSEEYADLRDPFLKLSGFPCSWTFFHHLREQIRREFTLHDHLREEAQSVLGQLRLGRTGDRPRTFVGVHVRRGDYLQVMPQRWKGVVGDSAYLRQAMDWFRARHEAPVFVVTSNGMEWCKENIDTSQGDVTFAGDGQEATPWKDFALLTQCNHTIMTIGTFGFWAAYLAGGDTVYLANFTLPDSEFLKIFKPEAAFLPEWVGINADLSPLWTLAKP

SEQ ID NO: 386 - protein, 459 aa, Artificial Sequence
  G250__Homo_sapiens__Q16790
MAPLCPSPWLPLLIPAPAPGLTVQLLLSLLLLVPVHPQRLPRMQEDSPLGGGSSGEDDPLGEEDLPSEEDSPREEDPPGEEDLPGEEDLPGEEDLPEVKPKSEEEGSLKLEDLPTVEAPGDPQEPQNNAHRDKEGDDQSHWRYGGDPPWPRVSPACAGRFQSPVDIRPQLAAFCPALRPLELLGFQLPPLPELRLRNNGHSVQLTLPPGLEMALGPGREYRALQLHLHWGAAGRPGSEHTVEGHRFPAEIHVVHLSTAFARVDEALGRPGGLAVLAAFLEEGPEENSAYEQLLSRLEEIAEEGSETQVPGLDISALLPSDFSRYFQYEGSLTTPPCAQGVIWTVFNQTVMLSAKQLHTLSDTLWGPGDSRLQLNFRATQPLNGRVIEASFPAGVDSSPRAAEPVQLNSCLAAGDILALVFGLLFAVTSVAFLVQMRRQHRRGTKGGVSYRPAEVAETGA

SEQ ID NO: 387 - protein, 138 aa, Artificial Sequence
  GAGE-1__Homo_sapiens__AAA82744
MSWRGRSTYRPRPRRYVEPPEMIGPMRPEQFSDEVEPATPEEGEPATQRQDPAAAQEGEDEGASAGQGPKPEADSQEQGHPQTGCECEDGPDGQEMDPPNPEEVKTPEEEMRSHYVAQTGILWLLMNNCFLNLSPRKP

SEQ ID NO: 388 - protein, 116 aa, Artificial Sequence
  GAGE-2__Homo_sapiens__Q6NT46
MSWRGRSTYRPRPRRYVEPPEMIGPMRPEQFSDEVEPATPEEGEPATQRQDPAAAQEGQDEGASAGQGPKPEAHSQEQGHPQTGCECEDGPDGQEMDPPNPEEVKTPEEGEKQSQC

SEQ ID NO: 389 - protein, 118 aa, Artificial Sequence
  GAGE-3__Homo_sapiens__Q13067
MNLSRGKSTYYWPRPRRYVQPPEVIGPMRPEQFSDEVEPATPEEGEPATQRQDPAAAQEGEDEGASAGQGPKPEADSQEQGHPQTGCECEDGPDGQEMDPPNPEEVKTPEEGEKQSQC

SEQ ID NO: 390 - protein, 117 aa, Artificial Sequence
  GAGE-4__Homo_sapiens__Q13068
MSWRGRSTYYWPRPRRYVQPPEMIGPMRPEQFSDEVEPATPEEGEPATQRQDPAAAQEGEDEGASAGQGPKPEADSQEQGHPQTGCECEDGPDGQEMDPPNPEEVKTPEEGEGQSQC

SEQ ID NO: 391 - protein, 117 aa, Artificial Sequence
  GAGE-5__Homo_sapiens__Q13069
MSWRGRSTYYWPRPRRYVQPPEVIGPMRPEQFSDEVEPATPEEGEPATQRQDPAAAQEGEDEGASAGQGPKPEADSQEQGHPQTGCECEDGPDGQEMDPPNPEEVKTPEEGEKQSQC

SEQ ID NO: 392 - protein, 117 aa, Artificial Sequence
  GAGE-6__Homo_sapiens__Q13070
MSWRGRSTYYWPRPRRYVQPPEVIGPMRPEQFSDEVEPATPEEGEPATQRQDPAAAQEGEDEGASAGQGPKPEADSQEQGHPQTGCECEDGPDGQEVDPPNPEEVKTPEEGEKQSQC

SEQ ID NO: 393 - protein, 117 aa, Artificial Sequence
  GAGE7b__Homo_sapiens__O76087
MSWRGRSTYYWPRPRRYVQPPEMIGPMRPEQFSDEVEPATPEEGEPATQRQDPAAAQEGEDEGASAGQGPKPEAHSQEQGHPQTGCECEDGPDGQEMDPPNPEEVKTPEEGEKQSQC

SEQ ID NO: 394 - protein, 116 aa, Artificial Sequence
  GAGE-8_(GAGE-2D)__Homo_sapiens__Q9UEU5
MSWRGRSTYRPRPRRYVEPPEMIGPMRPEQFSDEVEPATPEEGEPATQRQDPAAAQEGEDEGASAGQGPKPEADSQEQGHPQTGCECEDGPDGQEMDPPNPEEVKTPEEGEKQSQC

SEQ ID NO: 395 - protein, 447 aa, Artificial Sequence
  GASR__Homo_sapiens__P32239
MELLKLNRSVQGTGPGPGASLCRPGAPLLNSSSVGNLSCEPPRIRGAGTRELELAIRITLYAVIFLMSVGGNMLIIVVLGLSRRLRTVTNAFLLSLAVSDLLLAVACMPFTLLPNLMGTFIFGTVICKAVSYLMGVSVSVSTLSLVAIALERYSAICRPLQARVWQTRSHAARVIVATWLLSGLLMVPYPVYTVVQPVGPRVLQCVHRWPSARVRQTWSVLLLLLLFFIPGVVMAVAYGLISRELYLGLRFDGDSDSDSQSRVRNQGGLPGAVHQNGRCRPETGAVGEDSDGCYVQLPRSRPALELTALTAPGPGSGSRPTQAKLLAKKRVVRMLLVIVVLFFLCWLPVYSANTWRAFDGPGAHRALSGAPISFIHLLSYASACVNPLVYCFMHRRFRQACLETCARCCPRPPRARPRALPDEDPPTPSIASLSRLSYTTISTLGPG

SEQ ID NO: 396 - protein, 741 aa, Artificial Sequence
  GnT-V__Homo_sapiens__Q09328
MALFTPWKLSSQKLGFFLVTFGFIWGMMLLHFTIQQRTQPESSSMLREQILDLSKRYIKALAEENRNVVDGPYAGVMTAYDLKKTLAVLLDNILQRIGKLESKVDNLVVNGTGTNSTNSTTAVPSLVALEKINVADIINGAQEKCVLPPMDGYPHCEGKIKWMKDMWRSDPCYADYGVDGSTCSFFIYLSEVENWCPHLPWRAKNPYEEADHNSLAEIRTDFNILYSMMKKHEEFRWMRLRIRRMADAWIQAIKSLAEKQNLEKRKRKKVLVHLGLLTKESGFKIAETAFSGGPLGELVQWSDLITSLYLLGHDIRISASLAELKEIMKKVVGNRSGCPTVGDRIVELIYIDIVGLAQFKKTLGPSWVHYQCMLRVLDSFGTEPEFNHANYAQSKGHKTPWGKWNLNPQQFYTMFPHTPDNSFLGFVVEQHLNSSDIHHINEIKRQNQSLVYGKVDSFWKNKKIYLDIIHTYMEVHATVYGSSTKNIPSYVKNHGILSGRDLQFLLRETKLFVGLGFPYEGPAPLEAIANGCAFLNPKFNPPKSSKNTDFFIGKPTLRELTSQHPYAEVFIGRPHVWTVDLNNQEEVEDAVKAILNQKIEPYMPYEFTCEGMLQRINAFIEKQDFCHGQVMWPPLSALQVKLAEPGQSCKQVCQESQLICEPSFFQHLNKDKDMLKYKVTCQSSELAKDILVPSFDPKNKHCVFQGDLLLFSCAGAHPRHQRVCPCRDFIKGQVALCKDCL

SEQ ID NO: 397 - protein, 580 aa, Artificial Sequence
  GPC3__Homo_sapiens__I6QTG3
MAGTVRTACLVVAMLLSLDFPGQAQPPPPPPDATCHQVRSFFQRLQPGLKWVPETPVPGSDLQVCLPKGPTCCSRKMEEKYQLTARLNMEQLLQSASMELKFLIIQNAAVFQEAFEIVVRHAKNYTNAMFKNNYPSLTPQAFEFVGEFFTDVSLYILGSDINVDDMVNELFDSLFPVIYTQLMNPGLPDSALDINECLRGARRDLKVFGNFPKLIMTQVSKSLQVTRIFLQALNLGIEVINTTDHLKFSKDCGRMLTRMWYCSYCQGLMMVKPCGGYCNVVMQGCMAGVVEIDKYWREYILSLEELVNGMYRIYDMENVLLGLFSTIHDSIQYVQKNAGKLTTTIGKLCAHSQQRQYRSAYYPEDLFIDKKVLKVAHVEHEETLSSRRRELIQKLKSFISFYSALPGYICSHSPVAENDTLCWNGQELVERYSQKAARNGMKNQFNLHELKMKGPEPVVSQIIDKLKHINQLLRTMSMPKGRVLDKNLDEEGFESGDCGDDEDECIGGSGDGMIKVKNQLRFLAELAYDLDVDDAPGNSQQATPKDNEISTFHNLGNVHSPLKLLTSMAISVVCFFFLVH

SEQ ID NO: 398 - protein, 580 aa, Artificial Sequence; identical to SEQ ID NO: 397
  GPC3__Homo_sapiens__P51654

SEQ ID NO: 399 - protein, 580 aa, Artificial Sequence [sequence omitted]

SEQ ID NO: 400 - protein, 560 aa, Artificial Sequence
  GPNMB/m__Homo_sapiens__A0A024RA55
MECLYYFLGFLLLAARLPLDAAKRFHDVLGNERPSAYMREHNQLNGWSSDENDWNEKLYPVWKRGDMRWKNSWKGGRVQAVLTSDSPALVGSNITFAVNLIFPRCQKEDANGNIVYEKNCRNEAGLSADPYVYNWTAWSEDSDGENGTGQSHHNVFPDGKPFPHHPGWRRWNFIYVFHTLGQYFQKLGRCSVRVSVNTANVTLGPQLMEVTVYRRHGRAYVPIAQVKDVYVVTDQIPVFVTMFQKNDRNSSDETFLKDLPIMFDVLIHDPSHFLNYSTINYKWSFGDNTGLFVSTNHTVNHTYVLNGTFSLNLTVKAAAPGPCPPPPPPPRPSKPTPSLGPAGDNPLELSRIPDENCQINRYGHFQATITIVEGILEVNIIQMTDVLMPVPWPESSLIDFVVTCQGSIPTEVCTIISDPTCEITQNTVCSPVDVDEMCLLTVRRTFNGSGTYCVNLTLGDDTSLALTSTLISVPDRDPASPLRMANSALISVGCLAIFVTVISLLVYKKHKEYNPIENSPGNVVRSKGLSVFLNRAKAVFFPGNQEKDPLLKNQEFKGVS

SEQ ID NO: 401 - protein, 572 aa, Artificial Sequence
  GPNMB/m__Homo_sapiens__Q14956
MECLYYFLGFLLLAARLPLDAAKRFHDVLGNERPSAYMREHNQLNGWSSDENDWNEKLYPVWKRGDMRWKNSWKGGRVQAVLTSDSPALVGSNITFAVNLIFPRCQKEDANGNIVYEKNCRNEAGLSADPYVYNWTAWSEDSDGENGTGQSHHNVFPDGKPFPHHPGWRRWNFIYVFHTLGQYFQKLGRCSVRVSVNTANVTLGPQLMEVTVYRRHGRAYVPIAQVKDVYVVTDQIPVFVTMFQKNDRNSSDETFLKDLPIMFDVLIHDPSHFLNYSTINYKWSFGDNTGLFVSTNHTVNHTYVLNGTFSLNLTVKAAAPGPCPPPPPPPRPSKPTPSLATTLKSYDSNTPGPAGDNPLELSRIPDENCQINRYGHFQATITIVEGILEVNIIQMTDVLMPVPWPESSLIDFVVTCQGSIPTEVCTIISDPTCEITQNTVCSPVDVDEMCLLTVRRTFNGSGTYCVNLTLGDDTSLALTSTLISVPDRDPASPLRMANSALISVGCLAIFVTVISLLVYKKHKEYNPIENSPGNVVRSKGLSVFLNRAKAVFFPGNQEKDPLLKNQEFKGVS

SEQ ID NO: 402 - protein, 206 aa, Artificial Sequence [sequence omitted]

SEQ ID NO: 403 - protein, 206 aa, Artificial Sequence
  GPNMB/m__Homo_sapiens__Q96F58
MECLYYFLGFLLLAARLPLDAAKRFHDVLGNERPSAYMREHNQLNGWSSDENDWNEKLYPVWKRGDMRWKNSWKGGRVQAVLTSDSPALVGSNITFAVNLIFPRCQKEDANGNIVYEKNCRNEAGLSADPYVYNWTAWSEDSDGENGTGQSHHNVFPDGKPFPHHPGWRRWNFIYVFHTLGWLLQTPKLLLYLSLKFQPSLFLLYN

SEQ ID NO: 404 - protein, 879 aa, Artificial Sequence
  GRM3__Homo_sapiens__Q14832
MKMLTRLQVLTLALFSKGFLLSLGDHNFLRREIKIEGDLVLGGLFPINEKGTGTEECGRINEDRGIQRLEAMLFAIDEINKDDYLLPGVKLGVHILDTCSRDTYALEQSLEFVRASLTKVDEAEYMCPDGSYAIQENIPLLIAGVIGGSYSSVSIQVANLLRLFQIPQISYASTSAKLSDKSRYDYFARTVPPDFYQAKAMAEILRFFNWTYVSTVASEGDYGETGIEAFEQEARLRNICIATAEKVGRSNIRKSYDSVIRELLQKPNARVVVLFMRSDDSRELIAAASRANASFTWVASDGWGAQESIIKGSEHVAYGAITLELASQPVRQFDRYFQSLNPYNNHRNPWFRDFWEQKFQCSLQNKRNHRRVCDKHLAIDSSNYEQESKIMFVVNAVYAMAHALHKMQRTLCPNTTKLCDAMKILDGKKLYKDYLLKINFTAPFNPNKDADSIVKFDTFGDGMGRYNVFNFQNVGGKYSYLKVGHWAETLSLDVNSIHWSRNSVPTSQCSDPCAPNEMKNMQPGDVCCWICIPCEPYEYLADEFTCMDCGSGQWPTADLTGCYDLPEDYIRWEDAWAIGPVTIACLGFMCTCMVVTVFIKHNNTPLVKASGRELCYILLFGVGLSYCMTFFFIAKPSPVICALRRLGLGSSFAICYSALLTKTNCIARIFDGVKNGAQRPKFISPSSQVFICLGLILVQIVMVSVWLILEAPGTRRYTLAEKRETVILKCNVKDSSMLISLTYDVILVILCTVYAFKTRKCPENFNEAKFIGFTMYTTCIIWLAFLPIFYVTSSDYRVQTTTMCISVSLSGFVVLGCLFAPKVHIILFQPQKNVVTHRLHLNRFSVSGTGTTYSQSSASTYVPTVCNGREVLDSTTSSL

SEQ ID NO: 405 - protein, 648 aa, Artificial Sequence
  HAGE__Homo_sapiens__Q9NXZ2
MSHHGGAPKASTWVVASRRSSTVSRAPERRPAEELNRTGPEGYSVGRGGRWRGTSRPPEAVAAGHEELPLCFALKSHFVGAVIGRGGSKIKNIQSTTNTTIQIIQEQPESLVKIFGSKAMQTKAKAVIDNFVKKLEENYNSECGIDTAFQPSVGKDGSTDNNVVAGDRPLIDWDQIREEGLKWQKTKWADLPPIKKNFYKESTATSAMSKVEADSWRKENFNITWDDLKDGEKRPIPNPTCTFDDAFQCYPEVMENIKKAGFQKPTPIQSQAWPIVLQGIDLIGVAQTGTGKTLCYLMPGFIHLVLQPSLKGQRNRPGMLVLTPTRELALQVEGECCKYSYKGLRSVCVYGGGNRDEQIEELKKGVDIIIATPGRLNDLQMSNFVNLKNITYLVLDEADKMLDMGFEPQIMKILLDVRPDRQTVMTSATWPHSVHRLAQSYLKEPMIVYVGTLDLVAVSSVKQNIIVTTEEEKWSHMQTFLQSMSSTDKVIVFVSRKAVADHLSSDLILGNISVESLHGDREQRDREKALENFKTGKVRILIATDLASRGLDVHDVTHVYNFDFPRNIEEYVHRIGRTGRAGRTGVSITTLTRNDWRVASELINILERANQSIPEELVSMAERFKAHQQKREMERKMERPQGRPKKFH

SEQ ID NO: 406 - protein, 402 aa, Artificial Sequence
  hepsin__Homo_sapiens__B2ZDQ2
MAQKEGGRTVPCCSRPKVAALTAGTLLLLTAIGAASWAIVAVLLRSDQEPLYPVQVSSADARLMVFDKTEGTWRLLCSSRSNARVAGLSCEEMGFLRALTHSELDVRTAGANGTSGFFCVDEGRLPHTQRLLEVISVCDCPRGRFLAAICQDCGRRKLPVDRIVGGRDTSLGRWPWQVSLRYDGAHLCGGSLLSGDWVLTAAHCFPERNRVLSRWRVFAGAVAQASPHGLQLGVQAVVYHGGYLPFRDPNSEENSNDIALVHLSSPLPLTEYIQPVCLPAAGQALVDGKICTVTGWGNTQYYGQQAGVLQEARVPIISNDVCNGADFYGNQIKPKMFCAGYPEGGIDACQGDSGGPFVCEDSISRTPRWRLCGIVSWGTGCALAQKPGVYTKVSDFREWIFQ

SEQ ID NO: 407 - protein, 417 aa, Artificial Sequence
  hepsin__Homo_sapiens__P05981
MAQKEGGRTVPCCSRPKVAALTAGTLLLLTAIGAASWAIVAVLLRSDQEPLYPVQVSSADARLMVFDKTEGTWRLLCSSRSNARVAGLSCEEMGFLRALTHSELDVRTAGANGTSGFFCVDEGRLPHTQRLLEVISVCDCPRGRFLAAICQDCGRRKLPVDRIVGGRDTSLGRWPWQVSLRYDGAHLCGGSLLSGDWVLTAAHCFPERNRVLSRWRVFAGAVAQASPHGLQLGVQAVVYHGGYLPFRDPNSEENSNDIALVHLSSPLPLTEYIQPVCLPAAGQALVDGKICTVTGWGNTQYYGQQAGVLQEARVPIISNDVCNGADFYGNQIKPKMFCAGYPEGGIDACQGDSGGPFVCEDSISRTPRWRLCGIVSWGTGCALAQKPGVYTKVSDFREWIFQAIKTHSEASGMVTQL

SEQ ID NO: 408 - protein, 979 aa, Artificial Sequence
  Her2/neu__Homo_sapiens__B4DTR1
MELAALCRWGLLLALLPPGAASTQDNYLSTDVGSCTLVCPLHNQEVTAEDGTQRCEKCSKPCARVCYGLGMEHLREVRAVTSANIQEFAGCKKIFGSLAFLPESFDGDPASNTAPLQPEQLQVFETLEEITGYLYISAWPDSLPDLSVFQNLQVIRGRILHNGAYSLTLQGLGISWLGLRSLRELGSGLALIHHNTHLCFVHTVPWDQLFRNPHQALLHTANRPEDECVGEGLACHQLCARGHCWGPGPTQCVNCSQFLRGQECVEECRVLQGLPREYVNARHCLPCHPECQPQNGSVTCFGPEADQCVACAHYKDPPFCVARCPSGVKPDLSYMPIWKFPDEEGACQPCPINCTHSCVDLDDKGCPAEQRASPLTSIISAVVGILLVVVLGVVFGILIKRRQQKIRKYTMRRLLQETELVEPLTPSGAMPNQAQMRILKETELRKVKVLGSGAFGTVYKGIWIPDGENVKIPVAIKVLRENTSPKANKEILDEAYVMAGVGSPYVSRLLGICLTSTVQLVTQLMPYGCLLDHVRENRGRLGSQDLLNWCMQIAKGMSYLEDVRLVHRDLAARNVLVKSPNHVKITDFGLARLLDIDETEYHADGGKVPIKWMALESILRRRFTHQSDVWSYGVTVWELMTFGAKPYDGIPAREIPDLLEKGERLPQPPICTIDVYMIMVKCWMIDSECRPRFRELVSEFSRMARDPQRFVVIQNEDLGPASPLDSTFYRSLLEDDDMGDLVDAEEYLVPQQGFFCPDPAPGAGGMVHHRHRSSSTRSGGGDLTLGLEPSEEEAPRSPLAPSEGAGSDVFDGDLGMGAAKGLQSLPTHDPSPLQRYSEDPTVPLPSETDGYVAPLTCSPQPEYVNQPDVRPQPPSPREGPLPAARPAGATLERPKTLSPGKNGVVKDVFAFGGAVENPEYLTPQGGAAPQPHPPPAFSPAFDNLYYWDQDPPERGAPPSTFKGTPTAENPEYLGLDVPV

SEQ ID NO: 409 - protein, 87 aa, Artificial Sequence
  Her2/neu__Homo_sapiens__L8E8G2
MMRMKTFVMIHFHLMNGGKAKLYSRPHAKLLPEQRVTDKTGAPVEWPGQTQCSTETQTLAAMPAQAVMRVTCTVVDMHKSECAPAQT

SEQ ID NO: 410 - protein, 1255 aa, Artificial Sequence [sequence omitted]

SEQ ID NO: 411 - protein, 419 aa, Artificial Sequence
  Her2/neu__Homo_sapiens__Q9UK79
MELAALCRWGLLLALLPPGAASTQVCTGTDMKLRLPASPETHLDMLRHLYQGCQVVQGNLELTYLPTNASLSFLQDIQEVQGYVLIAHNQVRQVPLQRLRIVRGTQLFEDNYALAVLDNGDPLNNTTPVTGASPGGLRELQLRSLTEILKGGVLIQRNPQLCYQDTILWKDIFHKNNQLALTLIDTNRSRACHPCSPMCKGSRCWGESSEDCQSLTRTVCAGGCARCKGPLPTDCCHEQCAAGCTGPKHSDCLACLHFNHSGICELHCPALVTYNTDTFESMPNPEGRYTFGASCVTACPYNYLSTDVGSCTLVCPLHNQEVTAEDGTQRCEKCSKPCARGTHSLPPRPAAVPVPLRMQPGPAHPVLSFLRPSWDLVSAFYSLPLAPLSPTSVPISPVSVGRGPDPDAHVAVDLSRYEG

SEQ ID NO: 412 - protein, 182 aa, Artificial Sequence
  HLA-A2/m__Homo_sapiens__Q95387
GSHSMRYFFTSVSRPGRGEPRFIAVGYVDDTQFVRFDSDAASQRMEPRAPWIEQEGPEYWDGETRKVKAHSQTHRVDLGTLRGYYNQSEAGSHTVQRMYGCDVGSDWRFLRGYHQYAYDGKDYIALKEDLRSWTAADMAAQTTKHKWETAHVAEQLRAYLEGTCVEWLRRYLENGKETLQRT

SEQ ID NO: 413 - protein, 181 aa, Artificial Sequence
  HLA-A2/m__Homo_sapiens__Q9MYF8
SHSMRYFFTSVSRPGRGEPRFIAVGYVDDTQFVRFDSDAASQRMEPRAPWIEQEGPEYWDGETRKVKAHSQTHRVDLGTLRGYYNQSEAGSHTVQRMYGCDVGSDWRFLRGYHQYAYDGKDYIALKEDLRSWTAADMAAQTTKHKWEAAHVAEQLRAYLEGTCVEWLRRYLENGKETLQRT

SEQ ID NO: 414 - protein, 234 aa, Artificial Sequence
  homeobox_NKX3.1__Homo_sapiens__Q99801
MLRVPEPRPGEAKAEGAAPPTPSKPLTSFLIQDILRDGAQRQGGRTSSQRQRDPEPEPEPEPEGGRSRAGAQNDQLSTGPRAAPEEAETLAETEPERHLGSYLLDSENTSGALPRLPQTPKQPQKRSRAAFSHTQVIELERKFSHQKYLSAPERAHLAKNLKLTETQVKIWFQNRRYKTKRKQLSSELGDLEKHSSLPALKEEAFSRASLVSVYNSYPYYPYLYCVGSWSPAFW

SEQ ID NO: 415 - protein, 313 aa, Artificial Sequence
  HOM-TES-85__Homo_sapiens__B2RBQ6
MASFRKLTLSEKVPPNHPSRKKVNFLDMSLDDIIIYKELEGTNAEEEKNKRQNHSKKESPSRQQSKAHRHRHRRDYSRCRSNSEEGNHDKKPSQKPSGFKSGQHPLNGQPLIEQEKCSDNYEAQAEKNQGQSEGNQHQSEGNPDKSEESQGQPEENHHSERSRNHLERSLSQSDRSQGQLKRHHPQYERSHGQYKRSHGQSERSHGHSERSHGHSERSHGHSERSHGHSKRSRSQGDLVDTQSDLIATQRDLIATQKDLIATQRDLIATQRDLIVTQRDLVATERDLINQSGRSHGQSERHQRYSTGKNTITT

SEQ ID NO: 416 - protein, 313 aa, Artificial Sequence
  HOM-TES-85__Homo_sapiens__Q9P127
MASFRKLTLSEKVPPNHPSRKKVNFLDMSLDDIIIYKELEGTNAEEEKNKRQNHSKKESPSRQQSKAHRHRHRRGYSRCRSNSEEGNHDKKPSQKPSGFKSGQHPLNGQPLIEQEKCSDNYEAQAEKNQGQSEGNQHQSEGNPDKSEESQGQPEENHHSERSRNHLERSLSQSDRSQGQLKRHHPQYERSHGQYKRSHGQSERSHGHSERSHGHSERSHGHSERSHGHSKRSRSQGDLVDTQSDLIATQRDLIATQKDLIATQRDLIATQRDLIVTQRDLVATERDLINQSGRSHGQSERHQRYSTGKNTITT

SEQ ID NO: 417 - protein, 127 aa, Artificial Sequence
  HPG1__Homo_sapiens__12543784
MIKKNLKKLGIEETYLNIIKAIYDRPTASIQKTENLSTKTGTSQEYHLSPLWFYIVLEILASTIRQEKNLKDIHTEKEEVKLSLFADAMILYLKKPNDSTRKLLELIKKIHSSCRIKINIHFAFCSQ

SEQ ID NO: 418 - protein, 641 aa, Artificial Sequence
  HS71A__Homo_sapiens__P0DMV8
MAKAAAIGIDLGTTYSCVGVFQHGKVEIIANDQGNRTTPSYVAFTDTERLIGDAAKNQVALNPQNTVFDAKRLIGRKFGDPVVQSDMKHWPFQVINDGDKPKVQVSYKGETKAFYPEEISSMVLTKMKEIAEAYLGYPVTNAVITVPAYFNDSQRQATKDAGVIAGLNVLRIINEPTAAAIAYGLDRTGKGERNVLIFDLGGGTFDVSILTIDDGIFEVKATAGDTHLGGEDFDNRLVNHFVEEFKRKHKKDISQNKRAVRRLRTACERAKRTLSSSTQASLEIDSLFEGIDFYTSITRARFEELCSDLFRSTLEPVEKALRDAKLDKAQIHDLVLVGGSTRIPKVQKLLQDFFNGRDLNKSINPDEAVAYGAAVQAAILMGDKSENVQDLLLLDVAPLSLGLETAGGVMTALIKRNSTIPTKQTQIFTTYSDNQPGVLIQVYEGERAMTKDNNLLGRFELSGIPPAPRGVPQIEVTFDIDANGILNVTATDKSTGKANKITITNDKGRLSKEEIERMVQEAEKYKAEDEVQRERVSAKNALESYAFNMKSAVEDEGLKGKISEADKKKVLDKCQEVISWLDANTLAEKDEFEHKRKELEQVCNPIISGLYQGAGGPGPGGFGAQGPKGGSGSGPTIEEVD

SEQ ID NO: 419 - protein, 641 aa, Artificial Sequence; identical to SEQ ID NO: 418
  HS71B__Homo_sapiens__P0DMV9

SEQ ID NO: 420 - protein, 208 aa, Artificial Sequence
  HST-2__Homo_sapiens__P10767
MALGQKLFITMSRGAGRLQGTLWALVFLGILVGMVVPSPAGTRANNTLLDSRGWGTLLSRSRAGLAGEIAGVNWESGYLVGIKRQRRLYCNVGIGFHLQVLPDGRISGTHEENPYSLLEISTVERGVVSLFGVRSALFVAMNSKGRLYATPSFQEECKFRETLLPNNYNAYESDLYQGTYIALSKYGRVKRGSKVSPIMTVTHFLPRI

SEQ ID NO: 421 - protein, 523 aa, Artificial Sequence
  hTERT__Homo_sapiens__O94807
MPRAPRCRAVRSLLRSHYREVLPLATFVRRLGPQGWRLVQRGDPAAFRALVAQCLVCVPWDARPPPAAPSFRQVSCLKELVARVLQRLCERGAKNVLAFGFALLDGARGGPPEAFTTSVRSYLPNTVTDALRGSGAWGLLLRRVGDDVLVHLLARCALFVLVAPSCAYQVCGPPLYQLGAATQARPPPHASGPRRRLGCERAWNHSVREAGVPLGLPAPGARRRGGSASRSLPLPKRPRRGAAPEPERTPVGQGSWAHPGRTRGPSDRGFCVVSPARPAEEATSLEGALSGTRHSHPSVGRQHHAGPPSTSRPPRPWDTPCPPVYAETKHFLYSSGDKEQLRPSFLLSSLRPILTGARRLVETIFLGSSPGCQGLPAGCPACPSATGKCGPCFWSCLGTTRSAPTGCSSRRTARCELRSPQQPVSVPGRSPRALWRPPRRRTQTPVAWCSCSASTAPLAGVRLRAGLPAPAGAPRPLGLQAQRRRFLRNTKKFISLGKHAKLSLQELTWKMSVRDCAWLRRSP

SEQ ID NO: 422 - protein, 559 aa, Artificial Sequence
  iCE__Homo_sapiens__O00748
MRLHRLRARLSAVACGLLLLLVRGQGQDSASPIRTTHTGQVLGSLVHVKGANAGVQTFLGIPFAKPPLGPLRFAPPEPPESWSGVRDGTTHPAMCLQDLTAVESEFLSQFNMTFPSDSMSEDCLYLSIYTPAHSHEGSNLPVMVWIHGGALVFGMASLYDGSMLAALENVVVVIIQYRLGVLGFFSTGDKHATGNWGYLDQVAALRWVQQNIAHFGGNPDRVTIFGESAGGTSVSSLVVSPISQGLFHGAIMESGVALLPGLIASSADVISTVVANLSACDQVDSEALVGCLRGKSKEEILAINKPFKMIPGVVDGVFLPRHPQELLASADFQPVPSIVGVNNNEFGWLIPKVMRIYDTQKEMDREASQAALQKMLTLLMLPPTFGDLLREEYIGDNGDPQTLQAQFQEMMADSMFVIPALQVAHFQCSRAPVYFYEFQHQPSWLKNIRPPHMKADHGDELPFVFRSFFGGNYIKFTEEEEQLSRKMMKYWANFARNGNPNGEGLPHWPLFDQEEQYLQLNLQPAVGRALKAHRLQFWKKALPQKIQELEEPEERHTEL

SEQ ID NO: 423 - protein, 579 aa, Artificial Sequence
  IF2B3__Homo_sapiens__O00425
MNKLYIGNLSENAAPSDLESIFKDAKIPVSGPFLVKTGYAFVDCPDESWALKAIEALSGKIELHGKPIEVEHSVPKRQRIRKLQIRNIPPHLQWEVLDSLLVQYGVVESCEQVNTDSETAVVNVTYSSKDQARQALDKLNGFQLENFTLKVAYIPDEMAAQQNPLQQPRGRRGLGQRGSSRQGSPGSVSKQKPCDLPLRLLVPTQFVGAIIGKEGATIRNITKQTQSKIDVHRKENAGAAEKSITILSTPEGTSAACKSILEIMHKEAQDIKFTEEIPLKILAHNNFVGRLIGKEGRNLKKIEQDTDTKITISPLQELTLYNPERTITVKGNVETCAKAEEEIMKKIRESYENDIASMNLQAHLIPGLNLNALGLFPPTSGMPPPTSGPPSAMTPPYPQFEQSETETVHLFIPALSVGAIIGKQGQHIKQLSRFAGASIKIAPAEAPDAKVRMVIITGPPEAQFKAQGRIYGKIKEENFVSPKEEVKLEAHIRVPSFAAGRVIGKGGKTVNELQNLSSAEVVVPRDQTPDENDQVVVKITGHFYACQVAQRKIQEILTQVKQHQQQKALQSGPPQSRRK

SEQ ID NO: 424 - protein, 380 aa, Artificial Sequence
  IL-13Ra2__Homo_sapiens__Q14627
MAFVCLAIGCLYTFLISTTFGCTSSSDTEIKVNPPQDFEIVDPGYLGYLYLQWQPPLSLDHFKECTVEYELKYRNIGSETWKTIITKNLHYKDGFDLNKGIEAKIHTLLPWQCTNGSEVQSSWAETTYWISPQGIPETKVQDMDCVYYNWQYLLCSWKPGIGVLLDTNYNLFYWYEGLDHALQCVDYIKADGQNIGCRFPYLEASDYKDFYICVNGSSENKPIRSSYFTFQLQNIVKPLPPVYLTFTRESSCEIKLKWSIPLGPIPARCFDYEIEIREDDTTLVTATVENETYTLKTTNETRQLCFVVRSKVNIYCSDDGIWSEWSDKQCWEGEDLSKKTLLRFWLPFGFILILVIFVTGLLLRKPNTYPKMIPEFFCDT

SEQ ID NO: 425 - protein, 272 aa, Artificial Sequence
  IL2-RA__Homo_sapiens__P01589
MDSYLLMWGLLTFIMVPGCQAELCDDDPPEIPHATFKAMAYKEGTMLNCECKRGFRRIKSGSLYMLCTGNSSHSSWDNQCQCTSSATRNTTKQVTPQPEEQKERKTTEMQSPMQPVDQASLPGHCREPPPWENEATERIYHFVVGQMVYYQCVQGYRALHRGPAESVCKMTHGKTRWTQPQLICTGEMETSQFPGEEKPQASPEGRPESETSCLVTTTDFQIQTEMAATMETSIFTTEYQVAVAGCVFLLISVLLLSGLTWQRRQRKSRRTI

SEQ ID NO: 426 - protein, 551 aa, Artificial Sequence
  IL2-RB__Homo_sapiens__P14784
MAAPALSWRLPLLILLLPLATSWASAAVNGTSQFTCFYNSRANISCVWSQDGALQDTSCQVHAWPDRRRWNQTCELLPVSQASWACNLILGAPDSQKLTTVDIVTLRVLCREGVRWRVMAIQDFKPFENLRLMAPISLQVVHVETHRCNISWEISQASHYFERHLEFEARTLSPGHTWEEAPLLTLKQKQEWICLETLTPDTQYEFQVRVKPLQGEFTTWSPWSQPLAFRTKPAALGKDTIPWLGHLLVGLSGAFGFIILVYLLINCRNTGPWLKKVLKCNTPDPSKFFSQLSSEHGGDVQKWLSSPFPSSSFSPGGLAPEISPLEVLERDKVTQLLLQQDKVPEPASLSSNHSLTSCFTNQGYFFFHLPDALEIEACQVYFTYDPYSEEDPDEGVAGAPTGSSPQPLQPLSGEDDAYCTFPSRDDLLLFSPSLLGGPSPPSTAPGGSGAGEERMPPSLQERVPRDWDPQPLGPPTPGVPDLVDFQPPPELVLREAGEEVPDAGPREGVSFPWSRPPGQGEFRALNARLPLNTDAYLSLQELQGQDPTHLV

SEQ ID NO: 427 - protein, 369 aa, Artificial Sequence
  IL2-RG__Homo_sapiens__P31785
MLKPSLPFTSLLFLQLPLLGVGLNTTILTPNGNEDTTADFFLTTMPTDSLSVSTLPLPEVQCFVFNVEYMNCTWNSSSEPQPTNLTLHYWYKNSDNDKVQKCSHYLFSEEITSGCQLQKKEIHLYQTFVVQLQDPREPRRQATQMLKLQNLVIPWAPENLTLHKLSESQLELNWNNRFLNHCLEHLVQYRTDWDHSWTEQSVDYRHKFSLPSVDGQKRYTFRVRSRFNPLCGSAQHWSEWSHPIHWGSNTSKENPFLFALEAVVISVGSMGLIISLLCVYFWLERTMPRIPTLKNLEDLVTEYHGNFSAWSGVSKGLAESLQPDYSERLCLVSEIPPKGGALGEGPGASPCNQHSPYWAPPCYTLKPET

SEQ ID NO: 428 - protein, 184 aa, Artificial Sequence
  IMP3__Homo_sapiens__Q9NV31
MVRKLKFHEQKLLKQVDFLNWEVTDHNLHELRVLRRYRLQRREDYTRYNQLSRAVRELARRLRDLPERDQFRVRASAALLDKLYALGLVPTRGSLELCDFVTASSFCRRRLPTVLLKLRMAQHLQAAVAFVEQGHVRVGPDVVTDPAFLVTRSMEDFVTWVDSSKIKRHVLEYNEERDDFDLEA

SEQ ID NO: 429 - protein, 1049 aa, Artificial Sequence
  ITA5__Homo_sapiens__P08648
MGSRTPESPLHAVQLRWGPRRRPPLLPLLLLLLPPPPRVGGFNLDAEAPAVLSGPPGSFFGFSVEFYRPGTDGVSVLVGAPKANTSQPGVLQGGAVYLCPWGASPTQCTPIEFDSKGSRLLESSLSSSEGEEPVEYKSLQWFGATVRAHGSSILACAPLYSWRTEKEPLSDPVGTCYLSTDNFTRILEYAPCRSDFSWAAGQGYCQGGFSAEFTKTGRVVLGGPGSYFWQGQILSATQEQIAESYYPEYLINLVQGQLQTRQASSIYDDSYLGYSVAVGEFSGDDTEDFVAGVPKGNLTYGYVTILNGSDIRSLYNFSGEQMASYFGYAVAATDVNGDGLDDLLVGAPLLMDRTPDGRPQEVGRVYVYLQHPAGIEPTPTLTLTGHDEFGRFGSSLTPLGDLDQDGYNDVAIGAPFGGETQQGVVFVFPGGPGGLGSKPSQVLQPLWAASHTPDFFGSALRGGRDLDGNGYPDLIVGSFGVDKAVVYRGRPIVSASASLTIFPAMFNPEERSCSLEGNPVACINLSFCLNASGKHVADSIGFTVELQLDWQKQKGGVRRALFLASRQATLTQTLLIQNGAREDCREMKIYLRNESEFRDKLSPIHIALNFSLDPQAPVDSHGLRPALHYQSKSRIEDKAQILLDCGEDNICVPDLQLEVFGEQNHVYLGDKNALNLTFHAQNVGEGGAYEAELRVTAPPEAEYSGLVRHPGNFSSLSCDYFAVNQSRLLVCDLGNPMKAGASLWGGLRFTVPHLRDTKKTIQFDFQILSKNLNNSQSDVVSFRLSVEAQAQVTLNGVSKPEAVLFPVSDWHPRDQPQKEEDLGPAVHHVYELINQGPSSISQGVLELSCPQALEGQQLLYVTRVTGLNCTTNHPINPKGLELDPEGSLHHQQKREAPSRSSASSGPQILKCPEAECFRLRCELGPLHQQESQSLQLHFRVWAKTFLQREHQPFSLQCEAVYKALKMPYRILPRQLPQKERQVATAVQWTKAEGSYGVPLWIIILAILFGLLLLGLLIYILYKLGFFKRSLPYGTAMEKAQLKPPATSDA

SEQ ID NO: 430 - protein, 798 aa, Artificial Sequence
  ITB1__Homo_sapiens__P05556
MNLQPIFWIGLISSVCCVFAQTDENRCLKANAKSCGECIQAGPNCGWCTNSTFLQEGMPTSARCDDLEALKKKGCPPDDIENPRGSKDIKKNKNVTNRSKGTAEKLKPEDITQIQPQQLVLRLRSGEPQTFTLKFKRAEDYPIDLYYLMDLSYSMKDDLENVKSLGTDLMNEMRRITSDFRIGFGSFVEKTVMPYISTTPAKLRNPCTSEQNCTSPFSYKNVLSLTNKGEVFNELVGKQRISGNLDSPEGGFDAIMQVAVCGSLIGWRNVTRLLVFSTDAGFHFAGDGKLGGIVLPNDGQCHLENNMYTMSHYYDYPSIAHLVQKLSENNIQTIFAVTEEFQPVYKELKNLIPKSAVGTLSANSSNVIQLIIDAYNSLSSEVILENGKLSEGVTISYKSYCKNGVNGTGENGRKCSNISIGDEVQFEISITSNKCPKKDSDSFKIRPLGFTEEVEVILQYICECECQSEGIPESPKCHEGNGTFECGACRCNEGRVGRHCECSTDEVNSEDMDAYCRKENSSEICSNNGECVCGQCVCRKRDNTNEIYSGKFCECDNFNCDRSNGLICGGNGVCKCRVCECNPNYTGSACDCSLDTSTCEASNGQICNGRGICECGVCKCTDPKFQGQTCEMCQTCLGVCAEHKECVQCRAFNKGEKKDTCTQECSYFNITKVESRDKLPQPVQPDPVSHCKEKDVDDCWFYFTYSVNGNNEVMVHVVENPECPTGPDIIPIVAGVVAGIVLIGLALLLIWKLLMIIHDRREFAKFEKEKMNAKWDTGENPIYKSAVTTVVNPKYEGK

SEQ ID NO: 431 - protein, 788 aa, Artificial Sequence
  ITB6__Homo_sapiens__P18564
MGIELLCLFFLFLGRNDHVQGGCALGGAETCEDCLLIGPQCAWCAQENFTHPSGVGERCDTPANLLAKGCQLNFIENPVSQVEILKNKPLSVGRQKNSSDIVQIAPQSLILKLRPGGAQTLQVHVRQTEDYPVDLYYLMDLSASMDDDLNTIKELGSRLSKEMSKLTSNFRLGFGSFVEKPVSPFVKTTPEEIANPCSSIPYFCLPTFGFKHILPLTNDAERFNEIVKNQKISANIDTPEGGFDAIMQAAVCKEKIGWRNDSLHLLVFVSDADSHFGMDSKLAGIVIPNDGLCHLDSKNEYSMSTVLEYPTIGQLIDKLVQNNVLLIFAVTQEQVHLYENYAKLIPGATVGLLQKDSGNILQLIISAYEELRSEVELEVLGDTEGLNLSFTAICNNGTLFQHQKKCSHMKVGDTASFSVTVNIPHCERRSRHIIIKPVGLGDALELLVSPECNCDCQKEVEVNSSKCHHGNGSFQCGVCACHPGHMGPRCECGEDMLSTDSCKEAPDHPSCSGRGDCYCGQCICHLSPYGNIYGPYCQCDNFSCVRHKGLLCGGNGDCDCGECVCRSGWTGEYCNCTTSTDSCVSEDGVLCSGRGDCVCGKCVCTNPGASGPTCERCPTCGDPCNSKRSCIECHLSAAGQAREECVDKCKLAGATISEEEDFSKDGSVSCSLQGENECLITFLITTDNEGKTIIHSINEKDCPKPPNIPMIMLGVSLAILLIGVVLLCIWKLLVSFHDRKEVAKFEAERSKAKWQTGTNPLYRGSTSTFKNVTYKHREKQKVDLSTDC

SEQ ID NO: 432 - protein, 261 aa, Artificial Sequence
  kallikrein-2__Homo_sapiens__A0A024R4J4
MWDLVLSIALSVGCTGAVPLIQSRIVGGWECEKHSQPWQVAVYSHGWAHCGGVLVHPQWVLTAAHCLKKNSQVWLGRHNLFEPEDTGQRVPVSHSFPHPLYNMSLLKHQSLRPDEDSSHDLMLLRLSEPAKITDVVKVLGLPTQEPALGTTCYASGWGSIEPEEFLRPRSLQCVSLHLLSNDMCARAYSEKVTEFMLCAGLWTGGKDTCGGDSGGPLVCNGVLQGITSWGPEPCALPEKPAVYTKVVHYRKWIKDTIAANP

SEQ ID NO: 433 - protein, 223 aa, Artificial Sequence
  kallikrein-2__Homo_sapiens__A0A024R4N3
MWDLVLSIALSVGCTGAVPLIQSRIVGGWECEKHSQPWQVAVYSHGWAHCGGVLVHPQWVLTAAHCLKKNSQVWLGRHNLFEPEDTGQRVPVSHSFPHPLYNMSLLKHQSLRPDEDSSHDLMLLRLSEPAKITDVVKVLGLPTQEPALGTTCYASGWGSIEPEEFLRPRSLQCVSLHLLSNDMCARAYSEKVTEFMLCAGLWTGGKDTCGVSHPYSQHLEGKG

SEQ ID NO: 434 - protein, 62 aa, Artificial Sequence
  kallikrein-2__Homo_sapiens__B0AZU9
MSLLKHQSLRPDEDSSHDLMLLRLSEPAKITDVVKVLGLPTQEPALGTTCYASGWGSIEPEE

SEQ ID NO: 435 - protein, 244 aa, Artificial Sequence [sequence omitted]

SEQ ID NO: 436 - protein, 261 aa, Artificial Sequence; identical to SEQ ID NO: 432
  kallikrein-2__Homo_sapiens__P20151

SEQ ID NO: 437 - protein, 49 aa, Artificial Sequence
  kallikrein-2__Homo_sapiens__Q6T774
MWDLVLSIALSVGCTGIARSGWVGTTCLSLKTQARGSLSATASHTRSTI

SEQ ID NO: 438 - protein, 180 aa, Artificial Sequence
  kallikrein-2__Homo_sapiens__Q6T775
MWDLVLSIALSVGCTGAVPLIQSRIVGGWECEKHSQPWQVAVYSHGWAHCGGVLVHPQWVLTAAHCLKKNSQVWLGRHNLFEPEDTGQRVPVSHSFPHPLYNMSLLKHQSLRPDEDSSHDLMLLRLSEPAKITDVVKVLGLPTQEPALGTTCYASGWGSIEPEECTPGPDGVAGSPDAWV

SEQ ID NO: 439 - protein, 254 aa, Artificial Sequence
  kallikrein-4__Homo_sapiens__A0A0C4DFQ5
MATAGNPWGWFLGYLILGVAGSLVSGSCSQIINGEDCSPHSQPWQAALVMENELFCSGVLVHPQWVLSAAHCFQNSYTIGLGLHSLEADQEPGSQMVEASLSVRHPEYNRPLLANDLMLIKLDESVSESDTIRSISIASQCPTAGNSCLVSGWGLLANGRMPTVLQCVNVSVVSEEVCSKLYDPLYHPSMFCAGGGQDQKDSCNGDSGGPLICNGYLQGLVSFGKAPCGQVGVPGVYTNLCKFTEWIEKTVQAS

SEQ ID NO: 440 - protein, 75 aa, Artificial Sequence
  kallikrein-4__Homo_sapiens__Q5BQA0
MATAGNPWGWFLGYLILGVAGSLVSGSCSQIINGEDCSPHSQPWQAALVMENELFCSGVLVHPQWVLSAAHCFQK

SEQ ID NO: 441 - protein, 195 aa, Artificial Sequence
  kallikrein-4__Homo_sapiens__Q96PT0
MATAGNPWGWFLGYLILGVAGSLVSGSCSQIINGEDCSPHSQPWQAALVMENELFCSGVLVHPQWVLSAAHCFQNSYTIGLGLHSLEADQEPGSQMVEASLSVRHPEYNRPLLANDLMLIKLDESVSESDTIRSISIASQCPTAGNSCLVSGWGLLANGELTGVCLPSSRRSSAQSRGLTQSSASQAECLPCCSA

SEQ ID NO: 442 - protein, 159 aa, Artificial Sequence
  kallikrein-4__Homo_sapiens__Q96PT1
MATAGNPWGWFLGYLILGVAGSLVSGSCSQIINGEDCSPHSQPWQAALVMENELFCSGVLVHPQWVLSAAHCFQNSYTIGLGLHSLEADQEPGSQMVEASLSVRHPEYNRPLLANDLMLIKLDESVSESDTIRSISIASQCPTAGNSCLVSGWGLLANG

SEQ ID NO: 443 - protein, 254 aa, Artificial Sequence
  kallikrein-4__Homo_sapiens__Q9Y5K2
MATAGNPWGWFLGYLILGVAGSLVSGSCSQIINGEDCSPHSQPWQAALVMENELFCSGVLVHPQWVLSAAHCFQNSYTIGLGLHSLEADQEPGSQMVEASLSVRHPEYNRPLLANDLMLIKLDESVSESDTIRSISIASQCPTAGNSCLVSGWGLLANGRMPTVLQCVNVSVVSEEVCSKLYDPLYHPSMFCAGGGHDQKDSCNGDSGGPLICNGYLQGLVSFGKAPCGQVGVPGVYTNLCKFTEWIEKTVQAS

SEQ ID NO: 444 - protein, 890 aa, Artificial Sequence
  KI20A__Homo_sapiens__O95235
MSQGILSPPAGLLSDDDVVVSPMFESTAADLGSVVRKNLLSDCSVVSTSLEDKQQVPSEDSMEKVKVYLRVRPLLPSELERQEDQGCVRIENVETLVLQAPKDSFALKSNERGIGQATHRFTFSQIFGPEVGQASFFNLTVKEMVKDVLKGQNWLIYTYGVTNSGKTHTIQGTIKDGGILPRSLALIFNSLQGQLHPTPDLKPLLSNEVIWLDSKQIRQEEMKKLSLLNGGLQEEELSTSLKRSVYIESRIGTSTSFDSGIAGLSSISQCTSSSQLDETSHRWAQPDTAPLPVPANIRFSIWISFFEIYNELLYDLLEPPSQQRKRQTLRLCEDQNGNPYVKDLNWIHVQDAEEAWKLLKVGRKNQSFASTHLNQNSSRSHSIFSIRILHLQGEGDIVPKISELSLCDLAGSERCKDQKSGERLKEAGNINTSLHTLGRCIAALRQNQQNRSKQNLVPFRDSKLTRVFQGFFTGRGRSCMIVNVNPCASTYDETLHVAKFSAIASQLVHAPPMQLGFPSLHSFIKEHSLQVSPSLEKGAKADTGLDDDIENEADISMYGKEELLQVVEAMKTLLLKERQEKLQLEMHLRDEICNEMVEQMQQREQWCSEHLDTQKELLEEMYEEKLNILKESLTSFYQEEIQERDEKIEELEALLQEARQQSVAHQQSGSELALRRSQRLAASASTQQLQEVKAKLQQCKAELNSTTEELHKYQKMLEPPPSAKPFTIDVDKKLEEGQKNIRLLRTELQKLGESLQSAERACCHSTGAGKLRQALTTCDDILIKQDQTLAELQNNMVLVKLDLRKKAACIAEQYHTVLKLQGQVSAKKRLGTNQENQQPNQQPPGKKPFLRNLLPRTPTCQSSTDCSPYARILRSRRSPLLKSGPFGKKY

SEQ ID NO: 445 - protein, 370 aa, Artificial Sequence
  KIAA0205__Homo_sapiens__Q92604
MAITLEEAPWLGWLLVKALMRFAFMVVNNLVAIPSYICYVIILQPLRVLDSKRFWYIEGIMYKWLLGMVASWGWYAGYTVMEWGEDIKAVSKDEAVMLVNHQATGDVCTLMMCLQDKGLVVAQMMWLMDHIFKYTNFGIVSLVHGDFFIRQGRSYRDQQLLLLKKHLENNYRSRDRKWIVLFPEGGFLRKRRETSQAFAKKNNLPFLTNVTLPRSGATKIILNALVAQQKNGSPAGGDAKELDSKSKGLQWIIDTTIAYPKAEPIDIQTWILGYRKPTVTHVHYRIFPIKDVPLETDDLTTWLYQRFVEKEDLLSHFYETGAFPPSKGHKEAVSREMTLSNLWIFLIQSFAFLSGYMWYNIIQYFYHCLF

SEQ ID NO: 446 - protein, 725 aa, Artificial Sequence
  KIF2C__Homo_sapiens__Q99661
MAMDSSLQARLFPGLAIKIQRSNGLIHSANVRTVNLEKSCVSVEWAEGGATKGKEIDFDDVAAINPELLQLLPLHPKDNLPLQENVTIQKQKRRSVNSKIPAPKESLRSRSTRMSTVSELRITAQENDMEVELPAAANSRKQFSVPPAPTRPSCPAVAEIPLRMVSEEMEEQVHSIRGSSSANPVNSVRRKSCLVKEVEKMKNKREEKKAQNSEMRMKRAQEYDSSFPNWEFARMIKEFRATLECHPLTMTDPIEEHRICVCVRKRPLNKQELAKKEIDVISIPSKCLLLVHEPKLKVDLTKYLENQAFCFDFAFDETASNEVVYRFTARPLVQTIFEGGKATCFAYGQTGSGKTHTMGGDLSGKAQNASKGIYAMASRDVFLLKNQPCYRKLGLEVYVTFFEIYNGKLFDLLNKKAKLRVLEDGKQQVQVVGLQEHLVNSADDVIKMIDMGSACRTSGQTFANSNSSRSHACFQIILRAKGRMHGKFSLVDLAGNERGADTSSADRQTRMEGAEINKSLLALKECIRALGQNKAHTPFRESKLTQVLRDSFIGENSRTCMIATISPGISSCEYTLNTLRYADRVKELSPHSGPSGEQLIQMETEEMEACSNGALIPGNLSKEEEELSSQMSSFNEAMTQIRELEEKAMEELKEIIQQGPDWLELSEMTEQPDYDLETFVNKAESALAQQAKHFSALRDVIKALRLAMQLEEQASRQISSKKRPQ

SEQ ID NO: 447 - protein, 113 aa, Artificial Sequence
  KK-LC-1__Homo_sapiens__Q5H943
MNFYLLLASSILCALIVFWKYRRFQRNTGEMSSNSTALALVRPSSSGLINSNTDNNLAVYDLSRDILNNFPHSIARQKRILVNLSMVENKLVELEHTLLSKGFRGASPHRKST

SEQ ID NO: 448 - protein, 860 aa, Artificial Sequence [sequence omitted]

SEQ ID NO: 449 - protein, 433 aa, Artificial Sequence
  LGMN__Homo_sapiens__Q99538
MVWKVAVFLSVALGIGAVPIDDPEDGGKHWVVIVAGSNGWYNYRHQADACHAYQIIHRNGIPDEQIVVMMYDDIAYSEDNPTPGIVINRPNGTDVYQGVPKDYTGEDVTPQNFLAVLRGDAEAVKGIGSGKVLKSGPQDHVFIYFTDHGSTGILVFPNEDLHVKDLNETIHYMYKHKMYRKMVFYIEACESGSMMNHLPDNINVYATTAANPRESSYACYYDEKRSTYLGDWYSVNWMEDSDVEDLTKETLHKQYHLVKSHTNTSHVMQYGNKTISTMKVMQFQGMKRKASSPVPLPPVTHLDLTPSPDVPLTIMKRKLMNTNDLEESRQLTEEIQRHLDARHLIEKSVRKIVSLLAASEAEVEQLLSERAPLTGHSCYPEALLHFRTHCFNWHSPTYEYALRHLYVLVNLCEKPYPLHRIKLSMDHVCLGHY

SEQ ID NO: 450 - protein, 598 aa, Artificial Sequence
  LIRB2__Homo_sapiens__Q8N423
MTPIVTVLICLGLSLGPRTHVQTGTIPKPTLWAEPDSVITQGSPVTLSCQGSLEAQEYRLYREKKSASWITRIRPELVKNGQFHIPSITWEHTGRYGCQYYSRARWSELSDPLVLVMTGAYPKPTLSAQPSPVVTSGGRVTLQCESQVAFGGFILCKEGEEEHPQCLNSQPHARGSSRAIFSVGPVSPNRRWSHRCYGYDLNSPYVWSSPSDLLELLVPGVSKKPSLSVQPGPVVAPGESLTLQCVSDVGYDRFVLYKEGERDLRQLPGRQPQAGLSQANFTLGPVSRSYGGQYRCYGAHNLSSECSAPSDPLDILITGQIRGTPFISVQPGPTVASGENVTLLCQSWRQFHTFLLTKAGAADAPLRLRSIHEYPKYQAEFPMSPVTSAHAGTYRCYGSLNSDPYLLSHPSEPLELVVSGPSMGSSPPPTGPISTPAGPEDQPLTPTGSDPQSGLGRHLGVVIGILVAVVLLLLLLLLLFLILRHRRQGKHWTSTQRKADFQHPAGAVGPEPTDRGLQWRSSPAADAQEENLYAAVKDTQPEDGVEMDTRAAASEAPQDVTYAQLHSLTLRRKATEPPPSQEREPPAEPSIYATLAIH

SEQ ID NO: 451 - protein, 165 aa, Artificial Sequence
  LY6K__Homo_sapiens__Q17RY6
MALLALLLVVALPRVWTDANLTARQRDPEDSQRTDEGDNRVWCHVCERENTFECQNPRRCKWTEPYCVIAAVKIFPRFFMVAKQCSAGCAAMERPKPEEKRFLLEEPMPFFYLKCCKIRYCNLEGPPINSSVFKEYAGSMGESCGGLWLAILLLLASIAAGLSLS

SEQ ID NO: 452 - protein, 124 aa, Artificial Sequence
  MAGA5__Homo_sapiens__P43359
MSLEQKSQHCKPEEGLDTQEEALGLVGVQAATTEEQEAVSSSSPLVPGTLGEVPAAGSPGPLKSPQGASAIPTAIDFTLWRQSIKGSSNQEEEGPSTSPDPESVFRAALSKKVADLIHFLLLKY

SEQ ID NO: 453 - protein, 318 aa, Artificial Sequence
  MAGA8__Homo_sapiens__P43361
MLLGQKSQRYKAEEGLQAQGEAPGLMDVQIPTAEEQKAASSSSTLIMGTLEEVTDSGSPSPPQSPEGASSSLTVTDSTLWSQSDEGSSSNEEEGPSTSPDPAHLESLFREALDEKVAELVRFLLRKYQIKEPVTKAEMLESVIKNYKNHFPDIFSKASECMQVIFGIDVKEVDPAGHSYILVTCLGLSYDGLLGDDQSTPKTGLLIIVLGMILMEGSRAPEEAIWEALSVMGLYDGREHSVYWKLRKLLTQEWVQENYLEYRQAPGSDPVRYEFLWGPRALAETSYVKVLEHVVRVNARVRISYPSLHEEALGEEKGV

SEQ ID NO: 454 - protein, 429 aa, Artificial Sequence
  MAGAB__Homo_sapiens__P43364
METQFRRGGLGCSPASIKRKKKREDSGDFGLQVSTMFSEDDFQSTERAPYGPQLQWSQDLPRVQVFREQANLEDRSPRRTQRITGGEQVLWGPITQIFPTVRPADLTRVIMPLEQRSQHCKPEEGLQAQEEDLGLVGAQALQAEEQEAAFFSSTLNVGTLEELPAAESPSPPQSPQEESFSPTAMDAIFGSLSDEGSGSQEKEGPSTSPDLIDPESFSQDILHDKIIDLVHLLLRKYRVKGLITKAEMLGSVIKNYEDYFPEIFREASVCMQLLFGIDVKEVDPTSHSYVLVTSLNLSYDGIQCNEQSMPKSGLLIIVLGVIFMEGNCIPEEVMWEVLSIMGVYAGREHFLFGEPKRLLTQNWVQEKYLVYRQVPGTDPACYEFLWGPRAHAETSKMKVLEYIANANGRDPTSYPSLYEDALREEGEGV

SEQ ID NO: 455 - protein, 369 aa, Artificial Sequence
  MAGE-A10__Homo_sapiens__A0A024RC14
MPRAPKRQRCMPEEDLQSQSETQGLEGAQAPLAVEEDASSSTSTSSSFPSSFPSSSSSSSSSCYPLIPSTPEEVSADDETPNPPQSAQIACSSPSVVASLPLDQSDEGSSSQKEESPSTLQVLPDSESLPRSEIDEKVTDLVQFLLFKYQMKEPITKAEILESVIKNYEDHFPLLFSEASECMLLVFGIDVKEVDPTGHSFVLVTSLGLTYDGMLSDVQSMPKTGILILILSIIFIEGYCTPEEVIWEALNMMGLYDGMEHLIYGEPRKLLTQDWVQENYLEYRQVPGSDPARYEFLWGPRAHAEIRKMSLLKFLAKVNGSDPRSFPLWYEEALKDEEERAQDRIATTDDTTAMASASSSATGSFSYPE

SEQ ID NO: 456 - protein, 314 aa, Artificial Sequence
  MAGE-A12__Homo_sapiens__P43365
MPLEQRSQHCKPEEGLEAQGEALGLVGAQAPATEEQETASSSSTLVEVTLREVPAAESPSPPHSPQGASTLPTTINYTLWSQSDEGSSNEEQEGPSTFPDLETSFQVALSRKMAELVHFLLLKYRAREPFTKAEMLGSVIRNFQDFFPVIFSKASEYLQLVFGIEVVEVVRIGHLYILVTCLGLSYDGLLGDNQIVPKTGLLIIVLAIIAKEGDCAPEEKIWEELSVLEASDGREDSVFAHPRKLLTQDLVQENYLEYRQVPGSDPACYEFLWGPRALVETSYVKVLHHLLKISGGPHISYPPLHEWAFREGEE

SEQ ID NO: 457 - protein, 309 aa, Artificial Sequence
  MAGE-A1__Homo_sapiens__P43355
MSLEQRSLHCKPEEALEAQQEALGLVCVQAATSSSSPLVLGTLEEVPTAGSTDPPQSPQGASAFPTTINFTRQRQPSEGSSSREEEGPSTSCILESLFRAVITKKVADLVGFLLLKYRAREPVTKAEMLESVIKNYKHCFPEIFGKASESLQLVFGIDVKEADPTGHSYVLVTCLGLSYDGLLGDNQIMPKTGFLIIVLVMIAMEGGHAPEEEIWEELSVMEVYDGREHSAYGEPRKLLTQDLVQEKYLEYRQVPDSDPARYEFLWGPRALAETSYVKVLEYVIKVSARVRFFFPSLREAALREEEEGV

SEQ ID NO: 458 - protein, 314 aa, Artificial Sequence
  MAGE-A2__Homo_sapiens__P43356
MPLEQRSQHCKPEEGLEARGEALGLVGAQAPATEEQQTASSSSTLVEVTLGEVPAADSPSPPHSPQGASSFSTTINYTLWRQSDEGSSNQEEEGPRMFPDLESEFQAAISRKMVELVHFLLLKYRAREPVTKAEMLESVLRNCQDFFPVIFSKASEYLQLVFGIEVVEVVPISHLYILVTCLGLSYDGLLGDNQVMPKTGLLIIVLAIIAIEGDCAPEEKIWEELSMLEVFEGREDSVFAHPRKLLMQDLVQENYLEYRQVPGSDPACYEFLWGPRALIETSYVKVLHHTLKIGGEPHISYPPLHERALREGEE

SEQ ID NO: 459 - protein, 314 aa, Artificial Sequence; identical to SEQ ID NO: 192
  MAGE-A3__Homo_sapiens__P43357

SEQ ID NO: 460 - protein, 317 aa, Artificial Sequence
  MAGE-A4__Homo_sapiens__A0A024RC12
MSSEQKSQHCKPEEGVEAQEEALGLVGAQAPTTEEQEAAVSSSSPLVPGTLEEVPAAESAGPPQSPQGASALPTTISFTCWRQPNEGSSSQEEEGPSTSPDAESLFREALSNKVDELAHFLLRKYRAKELVTKAEMLERVIKNYKRCFPVIFGKASESLKMIFGIDVKEVDPASNTYTLVTCLGLSYDGLLGNNQIFPKTGLLIIVLGTIAMEGDSASEEEIWEELGVMGVYDGREHTVYGEPRKLLTQDWVQENYLEYRQVPGSNPARYEFLWGPRALAETSYVKVLEHVVRVNARVRIAYPSLREAALLEEEEGV

SEQ ID NO: 461 - protein, 317 aa, Artificial Sequence; identical to SEQ ID NO: 460
  MAGE-A4__Homo_sapiens__P43358

SEQ ID NO: 462 - protein, 317 aa, Artificial Sequence
  MAGE-A4__Homo_sapiens__Q1RN33
MSSEQKSQHCKPEEGVEAQEEALGLVGAQAPTTEEQEAAVSSSSPLVPGTLEEVPAAESAGPPQSPQGASALPTTISFTCWRQPNEGSSSQEEEGPSTSPDAESLFREALSNKVDELAHFLLRKYRAKELVTKAEMLERVIKNYKRCFPVIFGKASESLKMIFGIDVKEVDPTSNTYTLVTCLGLSYDGLLGNNQIFPKTGLLIIVLGTIAMEGDSASEEEIWEELGVMGVYDGREHTVYGEPRKLLTQDWVQENYLEYRQVPGSNPARYEFLWGPRALAETSYVKVLEHVVRVNARVRIAYPSLREAALLEEEEGV

SEQ ID NO: 463 - protein, 314 aa, Artificial Sequence [sequence omitted]

SEQ ID NO: 464 - protein, 314 aa, Artificial Sequence
  MAGE-A6__Homo_sapiens__P43360
MPLEQRSQHCKPEEGLEARGEALGLVGAQAPATEEQEAASSSSTLVEVTLGEVPAAESPDPPQSPQGASSLPTTMNYPLWSQSYEDSSNQEEEGPSTFPDLESEFQAALSRKVAKLVHFLLLKYRAREPVTKAEMLGSVVGNWQYFFPVIFSKASDSLQLVFGIELMEVDPIGHVYIFATCLGLSYDGLLGDNQIMPKTGFLIIILAIIAKEGDCAPEEKIWEELSVLEVFEGREDSIFGDPKKLLTQYFVQENYLEYRQVPGSDPACYEFLWGPRALIETSYVKVLHHMVKISGGPRISYPLLHEWALREGEE

SEQ ID NO: 465 - protein, 314 aa, Artificial Sequence [sequence omitted]

SEQ ID NO: 466 - protein, 315 aa, Artificial Sequence
  MAGE-A9__Homo_sapiens__P43362
MSLEQRSPHCKPDEDLEAQGEDLGLMGAQEPTGEEEETTSSSDSKEEEVSAAGSSSPPQSPQGGASSSISVYYTLWSQFDEGSSSQEEEEPSSSVDPAQLEFMFQEALKLKVAELVHFLLHKYRVKEPVTKAEMLESVIKNYKRYFPVIFGKASEFMQVIFGTDVKEVDPAGHSYILVTALGLSCDSMLGDGHSMPKAALLIIVLGVILTKDNCAPEEVIWEALSVMGVYVGKEHMFYGEPRKLLTQDWVQENYLEYRQVPGSDPAHYEFLWGSKAHAETSYEKVINYLVMLNAREPICYPSLYEEVLGEEQEGV

SEQ ID NO: 467 - protein, 347 aa, Artificial Sequence
  MAGE-B10__Homo_sapiens__Q96LZ2
MPRGQKSKLRAREKRRQARGGLEDLIDALDILEEEEESPPSASACLKDVFQSSLDGASNNPHGLREAQSTSTSATAASHTRHPEGVNDQMEERPICTQDLEATDSFPRGPVDEKVIILVHYLLYKYQMKEPITKADMLRNVTQMSKSQFPVILSRASEHLELIFGLDLKEVEPNKHIYVLVNKLDLGCDAKLSDETGVPKTGLLMTVLGIIFTNGNCVAEEEVWKVFNTMGLYDGIEHFMFGEPRKLLTKDLVKENYLEYQQVPNSDPPRYQFLWGPRAHAETSKMKVLEFLAKVNDTAPSEFSNWYTEALQDEEERARARVAAKARVSATAGARSKVKSSKSSQLQ

SEQ ID NO: 468 - protein, 324 aa, Artificial Sequence
  MAGE-B16__Homo_sapiens__A2A368
MSQDQESPRCTHDQHLQTFSETQSLEVAQVSKALEKTLLSSSHPLVPGKLKEAPAAKAESPLEVPQSFCSSSIAVTTTSSSESDEASSNQEEEDSPSSSEDTSDPRNVPADALDQKVAFLVNFMLHKCQMKKPITKADMLKIIIKDDESHFSEILLRASEHLEMIFGLDVVEVDPTTHCYGLFIKLGLTYDGMLSGEKGVPKTGLLIIVLGVIFMKGNRATEEEVWEVLNLTGVYSGKKHFIFGEPRMLITKDFVKEKYLEYQQVANSDPARYEFLWGPRAKAETSKMKVLEFVAKVHGSYPHSFPSQYAEALKEEEERARARI

SEQ ID NO: 469 - protein, 336 aa, Artificial Sequence
  MAGE-B17__Homo_sapiens__A8MXT2
MPRGQASKRRAREKRRQARGEDQCLGGAQATAAEKEKLPSSSSPACQSPPQSFPNAGIPQESQRASYPSSPASAVSLTSSDEGAKGQKGESPNSFHGPSSSESTGRDLLNTKTGELVQFLLNKYIRKEPITREAMLKVINRKYKQHFPEILRRSTENVEVVFGLYLKEMDPSRQSYVLVGKLDFPNQGSLSDGGGFPLSGLLMVLLSTIFMHGNRATEEEMWECLNALGMYKGRKHFIYGEPQELVTKDLVREGYLEYQQVPSSDPPRYEFLWGPRARAETSKMKVLEFVAKLNDTVASTYKSRYEEALREEEEQARARAVARDSARARASRSFQP

SEQ ID NO: 470 - protein, 347 aa, Artificial Sequence [sequence omitted]

SEQ ID NO: 471 - protein, 319 aa, Artificial Sequence
  MAGE-B2__Homo_sapiens__O15479
MPRGQKSKLRAREKRRKARDETRGLNVPQVTEAEEEEAPCCSSSVSGGAASSSPAAGIPQEPQRAPTTAAAAAAGVSSTKSKKGAKSHQGEKNASSSQASTSTKSPSEDPLTRKSGSLVQFLLYKYKIKKSVTKGEMLKIVGKRFREHFPEILKKASEGLSVVFGLELNKVNPNGHTYTFIDKVDLTDEESLLSSWDFPRRKLLMPLLGVIFLNGNSATEEEIWEFLNMLGVYDGEEHSVFGEPWKLITKDLVQEKYLEYKQVPSSDPPRFQFLWGPRAYAETSKMKVLEFLAKVNGTTPCAFPTHYEEALKDEEKAGV

SEQ ID NO: 472 - protein, 346 aa, Artificial Sequence
  MAGE-B3__Homo_sapiens__O15480
MPRGQKSTLHAREKRQQTRGQTQDHQGAQITATNKKKVSFSSPLILGATIQKKSAGRSRSALKKPQRALSTTTSVDVSYKKSYKGANSKIEKKQSFSQGLSSTVQSRTDPLIMKTNMLVQFLMEMYKMKKPIMKADMLKIVQKSHKNCFPEILKKASFNMEVVFGVDLKKVDSTKDSYVLVSKMDLPNNGTVTRGRGFPKTGLLLNLLGVIFMKGNCATEEKIWEFLNKMRIYDGKKHFIFGEPRKLITQDLVKLKYLEYRQVPNSNPARYEFLWGPRAHAETSKMKVLEFWAKVNKTVPSAFQFWYEEALRDEEERVQAAAMLNDGSSAMGRKCSKAKASSSSHA

SEQ ID NO: 473 - protein, 346 aa, Artificial Sequence
  MAGE-B4__Homo_sapiens__O15481
MPRGQKSKLRAREKRQRTRGQTQDLKVGQPTAAEKEESPSSSSSVLRDTASSSLAFGIPQEPQREPPTTSAAAAMSCTGSDKGDESQDEENASSSQASTSTERSLKDSLTRKTKMLVQFLLYKYKMKEPTTKAEMLKIISKKYKEHFPEIFRKVSQRTELVFGLALKEVNPTTHSYILVSMLGPNDGNQSSAWTLPRNGLLMPLLSVIFLNGNCAREEEIWEFLNMLGIYDGKRHLIFGEPRKLITQDLVQEKYLEYQQVPNSDPPRYQFLWGPRAHAETSKMKVLEFLAKVNDTTPNNFPLLYEEALRDEEERAGARPRVAARRGTTAMTSAYSRATSSSSSQPM

SEQ ID NO: 474 - protein, 275 aa, Artificial Sequence
  MAGE-B5__Homo_sapiens__Q9BZ81
MTSAGVFNAGSDERANSRDEEYPCSSEVSPSTESSCSNFINIKVGLLEQFLLYKFKMKQRILKEDMLKIVNPRYQNQFAEIHRRASEHIEVVFAVDLKEVNPTCHLYDLVSKLKLPNNGRIHVGKVLPKTGLLMTFLVVIFLKGNCANKEDTWKFLDMMQIYDGKKYYIYGEPRKLITQDFVRLTYLEYHQVPCSYPAHYQFLWGPRAYTETSKMKVLEYLAKVNDIAPGAFSSQYEEALQDEEESPSQRCSRNWHYCSGQDCLRAKFSSFSQPY

SEQ ID NO: 475 - protein, 407 aa, Artificial Sequence
  MAGE-B6__Homo_sapiens__Q8N7X4
MPRGHKSKLRTCEKRQETNGQPQGLTGPQATAEKQEESHSSSSSSRACLGDCRRSSDASIPQESQGVSPTGSPDAVVSYSKSDVAANGQDEKSPSTSRDASVPQESQGASPTGSPDAGVSGSKYDVAANGQDEKSPSTSHDVSVPQESQGASPTGSPDAGVSGSKYDVAAEGEDEESVSASQKAIIFKRLSKDAVKKKACTLAQFLQKKFEKKESILKADMLKCVRREYKPYFPQILNRTSQHLVVAFGVELKEMDSSGESYTLVSKLGLPSEGILSGDNALPKSGLLMSLLVVIFMNGNCATEEEVWEFLGLLGIYDGILHSIYGDARKIITEDLVQDKYVVYRQVCNSDPPCYEFLWGPRAYAETTKMRVLRVLADSSNTSPGLYPHLYEDALIDEVERALRLRA

SEQ ID NO: 476 - protein, 1142 aa, Artificial Sequence
  MAGE-C1__Homo_sapiens__O60732
MGDKDMPTAGMPSLLQSSSESPQSCPEGEDSQSPLQIPQSSPESDDTLYPLQSPQSRSEGEDSSDPLQRPPEGKDSQSPLQIPQSSPEGDDTQSPLQNSQSSPEGKDSLSPLEISQSPPEGEDVQSPLQNPASSFFSSALLSIFQSSPESTQSPFEGFPQSVLQIPVSAASSSTLVSIFQSSPESTQSPFEGFPQSPLQIPVSRSFSSTLLSIFQSSPERTQSTFEGFAQSPLQIPVSPSSSSTLLSLFQSFSERTQSTFEGFAQSSLQIPVSPSFSSTLVSLFQSSPERTQSTFEGFPQSPLQIPVSSSSSSTLLSLFQSSPERTHSTFEGFPQSLLQIPMTSSFSSTLLSIFQSSPESAQSTFEGFPQSPLQIPGSPSFSSTLLSLFQSSPERTHSTFEGFPQSPLQIPMTSSFSSTLLSILQSSPESAQSAFEGFPQSPLQIPVSSSFSYTLLSLFQSSPERTHSTFEGFPQSPLQIPVSSSSSSSTLLSLFQSSPECTQSTFEGFPQSPLQIPQSPPEGENTHSPLQIVPSLPEWEDSLSPHYFPQSPPQGEDSLSPHYFPQSPPQGEDSLSPHYFPQSPQGEDSLSPHYFPQSPPQGEDSMSPLYFPQSPLQGEEFQSSLQSPVSICSSSTPSSLPQSFPESSQSPPEGPVQSPLHSPQSPPEGMHSQSPLQSPESAPEGEDSLSPLQIPQSPLEGEDSLSSLHFPQSPPEWEDSLSPLHFPQFPPQGEDFQSSLQSPVSICSSSTSLSLPQSFPESPQSPPEGPAQSPLQRPVSSFFSYTLASLLQSSHESPQSPPEGPAQSPLQSPVSSFPSSTSSSLSQSSPVSSFPSSTSSSLSKSSPESPLQSPVISFSSSTSLSPFSEESSSPVDEYTSSSDTLLESDSLTDSESLIESEPLFTYTLDEKVDELARFLLLKYQVKQPITKAEMLTNVISRYTGYFPVIFRKAREFIEILFGISLREVDPDDSYVFVNTLDLTSEGCLSDEQGMSQNRLLILILSIIFIKGTYASEEVIWDVLSGIGVRAGREHFAFGEPRELLTKVWVQEHYLEYREVPNSSPPRYEFLWGPRAHSEVIKRKVVEFLAMLKNTVPITFPSSYKDALKDVEERAQAIIDTTDDSTATESASSSVMSPSFSSE

SEQ ID NO: 477 - protein, 373 aa, Artificial Sequence
  MAGE-C2__Homo_sapiens__Q9UBF1
MPPVPGVPFRNVDNDSPTSVELEDWVDAQHPTDEEEEEASSASSTLYLVFSPSSFSTSSSLILGGPEEEEVPSGVIPNLTESIPSSPPQGPPQGPSQSPLSSCCSSFSWSSFSEESSSQKGEDTGTCQGLPDSESSFTYTLDEKVAELVEFLLLKYEAEEPVTEAEMLMIVIKYKDYFPVILKRAREFMELLFGLALIEVGPDHFCVFANTVGLTDEGSDDEGMPENSLLIIILSVIFIKGNCASEEVIWEVLNAVGVYAGREHFVYGEPRELLTKVWVQGHYLEYREVPHSSPPYYEFLWGPRAHSESIKKKVLEFLAKLNNTVPSSFPSWYKDALKDVEERVQATIDTADDATVMASESLSVMSSNVSFSE

SEQ ID NO: 478 - protein, 643 aa, Artificial Sequence
  MAGE-C3__Homo_sapiens__Q8TD91
MLLPCHWVLDATFSDGSLGQWVKNTCATYALSPVVLPPQPQPRKKATDKDYSAFHLGHLREVRLFLRGGTSDQRMDSLVLCPTYFKLWRTLSGSPGLQLSDLHFGSQPEGKFSLRRAVSVKQREEPQDWPLNEKRTLWKDSDLPTWRRGTGYTLSLPAVSPGKRLWGEKAGSLPESEPLFTYTLDEKVDKLVQFLLLKYQAKEPLTRAEMQMNVINTYTGYFPMIFRKAREFIEILFGISLTEVDPDHFYVFVNTLDLTCEGSLSDEQGMPQNRLLILILSVIFIKGNCASEEVIWEVLNAIGPWSALAGFADVLSRLALWESEGPEAFCEESGLRSAEGSVLDLANPQGLAGHRQEDGRRGLTEASPQQKKGGEDEDMPAAGMPPLPQSPPEIPPQGPPKISPQGPPQSPPQSPLDSCSSPLLWTRLDEESSSEEEDTATWHALPESESLPRYALDEKVAELVQFLLLKYQTKEPVTKAEMLTTVIKKYKDYFPMIFGKAHEFIELIFGIALTDMDPDNHSYFFEDTLDLTYEGSLIDDQGMPKNCLLILILSMIFIKGSCVPEEVIWEVLSAIGPIQRPAREVLEFLSKLSSIIPSAFPSWYMDALKDMEDRAQAIIDTTDDATAMASASPSVMSTNFCPE

SEQ ID NO: 479 - protein, 778 aa, Artificial Sequence
  MAGE-D1__Homo_sapiens__Q9Y5V3
MAQKMDCGAGLLGFQAEASVEDSALLMQTLMEAIQISEAPPTNQATAAASPQSSQPPTANEMADIQVSAAAARPKSAFKVQNATTKGPNGVYDFSQAHNAKDVPNTQPKAAFKSQNATPKGPNAAYDFSQAATTGELAANKSEMAFKAQNATTKVGPNATYNFSQSLNANDLANSRPKTPFKAWNDTTKAPTADTQTQNVNQAKMATSQADIETDPGISEPDGATAQTSADGSQAQNLESRTIIRGKRTRKINNLNVEENSSGDQRRAPLAAGTWRSAPVPVTTQNPPGAPPNVLWQTPLAWQNPSGWQNQTARQTPPARQSPPARQTPPAWQNPVAWQNPVIWPNPVIWQNPVIWPNPIVWPGPVVWPNPLAWQNPPGWQTPPGWQTPPGWQGPPDWQGPPDWPLPPDWPLPPDWPLPTDWPLPPDWIPADWPIPPDWQNLRPSPNLRPSPNSRASQNPGAAQPRDVALLQERANKLVKYLMLKDYTKVPIKRSEMLRDIIREYTDVYPEIIERACFVLEKKFGIQLKEIDKEEHLYILISTPESLAGILGTTKDTPKLGLLLVILGVIFMNGNRASEAVLWEALRKMGLRPGVRHPLLGDLRKLLTYEFVKQKYLDYRRVPNSNPPEYEFLWGLRSYHETSKMKVLRFIAEVQKRDPRDWTAQFMEAADEALDALDAAAAEAEARAEARTRMGIGDEAVSGPWSWDDIEFELLTWDEEGDFGDPWSRIPFTFWARYHQNARSRFPQTFAGPIIGPGGTASANFAANFGAIGFFWVE

SEQ ID NO: 480 - protein, 606 aa, Artificial Sequence
  MAGE-D2__Homo_sapiens__Q9UNF1
MSDTSESGAGLTRFQAEASEKDSSSMMQTLLTVTQNVEVPETPKASKALEVSEDVKVSKASGVSKATEVSKTPEAREAPATQASSTTQLTDTQVLAAENKSLAADTKKQNADPQAVTMPATETKKVSHVADTKVNTKAQETEAAPSQAPADEPEPESAAAQSQENQDTRPKVKAKKARKVKHLDGEEDGSSDQSQASGTTGGRRVSKALMASMARRASRGPIAFWARRASRTRLAAWARRALLSLRSPKARRGKARRRAAKLQSSQEPEAPPPRDVALLQGRANDLVKYLLAKDQTKIPIKRSDMLKDIIKEYTDVYPEIIERAGYSLEKVFGIQLKEIDKNDHLYILLSTLEPTDAGILGTTKDSPKLGLLMVLLSIIFMNGNRSSEAVIWEVLRKLGLRPGIHHSLFGDVKKLITDEFVKQKYLDYARVPNSNPPEYEFFWGLRSYYETSKMKVLKFACKVQKKDPKEWAAQYREAMEADLKAAAEAAAEAKARAEIRARMGIGLGSENAAGPCNWDEADIGPWAKARIQAGAEAKAKAQESGSASTGASTSTNNSASASASTSGGFSAGASLTATLTFGLFAGLGGAGASTSGSSGACGFSYK

SEQ ID NO: 481 - protein, 741 aa, Artificial Sequence
  MAGE-D4__Homo_sapiens__Q96JG8
MAEGSFSVQSESYSVEDMDEGSDEVGEEEMVEGNDYEEFGAFGGYGTLTSFDIHILRAFGSLGPGLRILSNEPWELENPVLAQTLVEALQLDPETLANETAARAANVARAAASNRAARAAAAAARTAFSQVVASHRVATPQVSGEDTQPTTYAAEAQGPTPEPPLASPQTSQMLVTSKMAAPEAPATSAQSQTGSPAQEAATEGPSSACAFSQAPCAREVDANRPSTAFLGQNDVFDFTQPAGVSGMAFPRPKRPAPAQEAATEGPSAASGVPQTGPGREVAATRPKTTKSGKALAKTRWVEPQNVVAAAAAKAKMATSIPEPEGAAAATAQHSAEPWARMGGKRTKKSKHLDDEYESSEEERETPAVPPTWRASQPSLTVRAQLAPRPPMAPRSQIPSRHVLCLPPRNVTLLQERANKLVKYLMIKDYKKIPIKRADMLKDVIREYDEHFPEIIERATYTLEKKFGIHLKEIDKEEHLYILVCTRDSSARLLGKTKDTPRLSLLLVILGVIFMNGNRASEAVLWEALRKMGLRPGVRHPFLGDLRKLITDDFVKQKYLEYKKIPNSNPPEYEFLWGLRARHETSKMRVLRFIAQNQNRDPREWKAHFLEAVDDAFKTMDVDMAEEHARAQMRAQMNIGDEALIGRWSWDDIQVELLTWDEDGDFGDAWARIPFAFWARYHQYILNSNRANRRATWRAGVSSGTNGGASTSVLDGPSTSSTIRTRNAARAGASFFSWIQHR

SEQ ID NO: 482 - protein, 373 aa, Artificial Sequence [sequence omitted]

SEQ ID NO: 483 - protein, 957 aa, Artificial Sequence
  MAGE-E1_(MAGE1)__Homo_sapiens__Q9HCI5
MSLVSQNSRRRRRRVAKATAHNSSWGEMQAPNAPGLPADVPGSDVPQGPSDSQILQGLCASEGPSTSVLPTSAEGPSTFVPPTISEASSASGQPTISEGPGTSVLPTPSEGLSTSGPPTISKGLCTSVTLAASEGRNTSRPPTSSEEPSTSVPPTASEVPSTSLPPTPGEGTSTSVPPTAYEGPSTSVVPTPDEGPSTSVLPTPGEGPGTSVPLAATEGLSTSVQATPDEGPSTSVPPTATEGLSTPVPPTRDEGPSTSVPATPGEGPSTSVLPAASDGQSISLVPTRGKGSSTSVPPTATEGLSTSVQPTAGEGSSTSVPPTPGGGLSTSVPPTATEELSTSVPPTPGEGPSTSVLPIPGEGLSTSVPPTASDGSDTSVPPTPGEGASTLVQPTAPDGPGSSVLPNPGEGPSTLFSSSASVDRNPSKCSLVLPSPRVTKASVDSDSEGPKGAEGPIEFEVLRDCESPNSISIMGLNTSRVAITLKPQDPMEQNVAELLQFLLVKDQSKYPIRESEMREYIVKEYRNQFPEILRRAAAHLECIFRFELRELDPEAHTYILLNKLGPVPFEGLEESPNGPKMGLLMMILGQIFLNGNQAKEAEIWEMLWRMGVQRERRLSIFGNPKRLLSVEFVWQRYLDYRPVTDCKPVEYEFFWGPRSHLETTKMKILKFMAKIYNKDPMDWPEKYNEALEEDAARAFAEGWQALPHFRRPFFEEAAAEVPSPDSEVSSYSSKYAPHSWPESRLESKARKLVQLFLLMDSTKLPIPKKGILYYIGRECSKVFPDLLNRAARTLNHVYGTELVVLDPRNHSYTLYNRREMEETEEIVDSPNRPGNNFLMQVLSFIFIMGNHARESAVWAFLRGLGVQAGRKHVITCRYLSQRYIDSLRVPDSDPVQYEFVWGPRARLETSKMKALRYVARIHRKEPQDWPQQYREAMEDEANRADVGHRQIFVHNFR

SEQ ID NO: 484 - protein, 523 aa, Artificial Sequence
  MAGE-E2__Homo_sapiens__Q8TD90
MSLVSQNARHCSAEITADYGDGRGEIQATNASGSPTSMLVVDAPQCPQAPINSQCVNTSQAVQDPNDLEVLIDEQSRRLGALRVHDPLEDRSIALVNFMRMKSQTEGSIQQSEMLEFLREYSDQFPEILRRASAHLDQVFGLNLRVIDPQADTYNLVSKRGFQITDRIAESLDMPKASLLALVLGHILLNGNRAREASIWDLLLKVDMWDKPQRINNLFGNTRNLLTTDFVCMRFLEYWPVYGTNPLEFEFLWGSRAHREITKMEALKFVSDAHDEEPWSWPEEYNKALEGDKTKERSLTAGLEFWSEDTMNDKANDLVQLAISVTEEMLPIHQDELLAHTGKEFEDVFPNILNRATLILDMFYGLSLIEVDTSEHIYLLVQQPESEEEQVMLESLGRPTQEYVMPILGLIFLMGNRVKEANVWNLLRRFSVDVGRKHSITRKLMRQRYLECRPLSYSNPVEYELLWGPRAHHETIKMKVLEYMARLYRKRPQNWPEQYREAVEDEEARAKSEATIMFFLDPT

SEQ ID NO: 485 - protein, 307 aa, Artificial Sequence
  MAGE-F1__Homo_sapiens__Q9HAY2
MLQTPESRGLPVPQAEGEKDGGHDGETRAPTASQERPKEELGAGREEGAAEPALTRKGARALAAKALARRRAYRRLNRTVAELVQFLLVKDKKKSPITRSEMVKYVIGDLKILFPDIIARAAEHLRYVFGFELKQFDRKHHTYILINKLKPLEEEEEEDLGGDGPRLGLLMMILGLIYMRGNSAREAQVWEMLRRLGVQPSKYHFLFGYPKRLIMEDFVQQRYLSYRRVPHTNPPEYEFSWGPRSNLEISKMEVLGFVAKLHKKEPQHWPVQYREALADEADRARAKARAEASMRARASARAGIHLW

SEQ ID NO: 486 - protein, 219 aa, Artificial Sequence
  MAGE-H1__Homo_sapiens__Q9H213
MPRGRKSRRRRNARAAEENRNNRKIQASEASETPMAASVVASTPEDDLSGPEEDPSTPEEASTTPEEASSTAQAQKPSVPRSNFQGTKKSLLMSILALIFIMGNSAKEALVWKVLGKLGMQPGRQHSIFGDPKKIVTEEFVRRGYLIYKPVPRSSPVEYEFFWGPRAHVESSKLKVMHFVARVRNRCSKDWPCNYDWDSDDDAEVEAILNSGARGYSAP

SEQ ID NO: 487 - protein, 1249 aa, Artificial Sequence
  MAGEL2__Homo_sapiens__Q9UJ55
MSQLSKNLGDSSPPAEAPKPPVYSRPTVLMRAPPASSRAPPVPWDPPPIDLQASLAAWQAPQPAWEAPQGQLPAPVVPMTQPPALGGPIVPAPPLGGPMGKPPTPGVLMVHPPPPGAPMAQPPTPGVLMVHPSAPGAPMAHPPPPGTPMSHPPPPGTPMAHPPPPGTPMAHPPPPGTPMVHPPPPGTPMAHPPPPGTPMAHPPPPGTPMAHPPPPGTPMAHPPPPGTPMAQPPAPGVLMAQPLTPGVLMVQPAAPGAPMVQPPPAAMMTQPQPSGAPMAKPPGPGVLMIHPPGARAPMTQPPASGAPMAQPAAPPAQPMAPPAQPMASWAPQAQPLILQIQSQVIRAPPQVPQGPQAPPAQLATPPGWQATSPGWQATQQGWQATPLTWQTTQVTWQAPAVTWQVPPPMRQGPPPIRPGPPPIRPGPPPVRQAPPLIRQAPPVIRQAPPVIRQAPPVIRQAPAVIRQAPPVIRQAPPVIRQAPPVIRQAPPLIRQAPPPIRPAPQVLATQPPLWQALPPPPPLRQAPQARLPAPQVQAAPQVPTAPPATQVPAAPPAGPQVPQPVLPAPLSAPLSAPQAVHCPSIIWQAPKGQPPVPHEIPTSMEFQEVQQTQALAWQAQKAPTHIWQPLPAQEAQRQAPPLVQLEQPFQGAPPSQKAVQIQLPPQQAQASGPQAEVPTLPLQPSWQAPPAVLQAQPGPPVAAANFPLGSAKSLMTPSGECRASSIDRRGSSKERRTSSKERRAPSKDRMIFAATFCAPKAVSAARAHLPAAWKNLPATPETFAPSSSVFPATSQFQPASLNAFKGPSAASETPKSLPYALQDPFACVEALPAVPWVPQPNMNASKASQAVPTFLMATAAAPQATATTQEASKTSVEPPRRSGKATRKKKHLEAQEDSRGHTLAFHDWQGPRPWENLNLSDWEVQSPIQVSGDWEHPNTPRGLSGWEGPSTSRILSGWEGPSASWALSAWEGPSTSRALGLSESPGSSLPVVVSEVASVSPGSSATQDNSKVEAQPLSPLDERANALVQFLLVKDQAKVPVQRSEMVKVILREYKDECLDIINRANNKLECAFGYQLKEIDTKNHAYIIINKLGYHTGNLVASYLDRPKFGLLMVVLSLIFMKGNCVREDLIFNFLFKLGLDVRETNGLFGNTKKLITEVFVRQKYLEYRRIPYTEPAEYEFLWGPRAFLETSKMLVLRFLAKLHKKDPQSWPFHYLEALAECEWEDTDEDEPDTGDSAHGPTSRPPPR

SEQ ID NO: 488 - protein, 93 aa, Artificial Sequence
  mammaglobin_A__Homo_sapiens__Q13296
MKLLMVLMLAALSQHCYAGSGCPLLENVISKTINPQVSKTEYKELLQEFIDDNATTNAIDELKECFLNQTDETLSNVEVFMQLIYDSSLCDLF

SEQ ID NO: 489 - protein, 120 aa, Artificial Sequence
  mammaglobin_A__Homo_sapiens__Q6NX70
MKLLMVLMLAALSQHCYAGSGCPLLENVISKTINPQVSKTEYKELLQEFIDDNATTNAIDELKECFLNQTDETLSNVEVFMVISFSSYKLFKSPDQGQVGSSFLTDNAKATSEQAFSYIG

SEQ ID NO: 490 - protein, 118 aa, Artificial Sequence
  MART-1/melan-A__Homo_sapiens__Q16655
MPREDAHFIYGYPKKGHGHSYTTAEEAAGIGILTVILGVLLLIGCWYCRRRNGYRALMDKSLHVGTQCALTRRCPQEGFDHRDSKVSLQEKNCEPVVPNAPPAYEKLSAEQSPPPYSP

SEQ ID NO: 491 - protein, 493 aa, Artificial Sequence
  MART-2__Homo_sapiens__Q5VTY9
MLPRWELALYLLASLGFHFYSFYEVYKVSREHEEELDQEFELETDTLFGGLKKDATDFEWSFWMEWGKQWLVWLLLGHMVVSQMATLLARKHRPWILMLYGMWACWCVLGTPGVAMVLLHTTISFCVAQFRSQLLTWLCSLLLLSTLRLQGVEEVKRRWYKTENEYYLLQFTLTVRCLYYTSFSLELCWQQLPAASTSYSFPWMLAYVFYYPVLHNGPILSFSEFIKQMQQQEHDSLKASLCVLALGLGRLLCWWWLAELMAHLMYMHAIYSSIPLLETVSCWTLGGLALAQVLFFYVKYLVLFGVPALLMRLDGLTPPALPRCVSTMFSFTGMWRYFDVGLHNFLIRYVYIPVGGSQHGLLGTLFSTAMTFAFVSYWHGGYDYLWCWAALNWLGVTVENGVRRLVETPCIQDSLARYFSPQARRRFHAALASCSTSMLILSNLVFLGGNEVGKTYWNRIFIQGWPWVTLSVLGFLYCYSHVGIAWAQTYATD

SEQ ID NO: 492 - protein, 317 aa, Artificial Sequence
  MC1_R__Homo_sapiens__Q01726
MAVQGSQRRLLGSLNSTPTAIPQLGLAANQTGARCLEVSISDGLFLSLGLVSLVENALVVATIAKNRNLHSPMYCFICCLALSDLLVSGSNVLETAVILLLEAGALVARAAVLQQLDNVIDVITCSSMLSSLCFLGAIAVDRYISIFYALRYHSIVTLPRARRAVAAIWVASVVFSTLFIAYYDHVAVLLCLVVFFLAMLVLMAVLYVHMLARACQHAQGIARLHKRQRPVHQGFGLKGAVTLTILLGIFFLCWGPFFLHLTLIVLCPEHPTCGCIFKNFNLFLALIICNAIIDPLIYAFHSQELRRTLKEVLTCSW

SEQ ID NO: 493 - protein, 317 aa, Artificial Sequence; identical to SEQ ID NO: 492
  MC1_R__Homo_sapiens__Q1JUL4

SEQ ID NO: 494 - protein, 317 aa, Artificial Sequence
  MC1_R__Homo_sapiens__Q1JUL6
MAVQGSQRRLLGSLNSTPTAIPQLGLAANQTGARCLEVSISDGLFLSLGLVSLVENALVVATIAKNRNLHSPMYCFICCLALSDLLVSGSNVLETAVILLLEAGALVARAAVLQQLDNVIDVITCSSMLSSLCFLGAIAVDRYISIFYALRYHSIVTLPRARQAVAAIWVASVVFSTLFIAYYDHVAVLLCLVVFFLAMLVLMAVLYVHMLARACQHAQGIARLHKRQRPVHQGFGLKGAVTLTILLGIFFLCWGPFFLHLTLIVLCPEHPTCGCIFKNFNLFLALIICNAIIDPLIYAFHSQELRRTLKEVLTCSW

SEQ ID NO: 495 - protein, 317 aa, Artificial Sequence
  MC1_R__Homo_sapiens__Q1JUL8
MAVQGSQRRLLGSLNSTPTAIPQLGLAANQTGARCLEVSISDGLFLSLGLVSLVENALVVATIAKNRNLHSPMYCFICCLALSDLLVSGSNVLETAVILLLEAGALVARAAVLQQLDNVTDVITCSSMLSSLCFLGAIAVDRYISIFYALRYHSIVTLPRARRAVAAIWVASVVFSTLFIAYYDHVAVLLCLVVFFLAMLVLMAVLYVHMLARACQHAQGIARLHKRQRPVHQGFGLKGAVTLTILLGIFFLCWGPFFLHLTLIVLCPEHPTCGCIFKNFNLFLALIICNAIIDPLIYAFHSQELRRTLKEVLTCSW

SEQ ID NO: 496 - protein, 317 aa, Artificial Sequence [sequence omitted]

SEQ ID NO: 497 - protein, 317 aa, Artificial Sequence [sequence omitted]

SEQ ID NO: 498 - protein, 317 aa, Artificial Sequence [sequence omitted]

SEQ ID NO: 499 - protein, 317 aa, Artificial Sequence [sequence omitted]

SEQ ID NO: 500 - protein, 317 aa, Artificial Sequence [sequence omitted]

SEQ ID NO: 501 - protein, 316 aa, Artificial Sequence
  MC1_R__Homo_sapiens__Q1JUM5
MAVQGSQRRLLGSLNSTPTAIPQLGLAANQTGARCLEVSISDGLFLSLGLVSLVENALVVATIAKNRNLHSPMYCFICCLALSDLLVSGSNVLETAVILLLEAGALVARAAVLQQLDNVIDVITCSSMLSSLCFLGAIAVDRYISIYALRYHSIVTLPRARQAVAAIWVASVVFSTLFIAYYDHVAVLLCLVVFFLAMLVLMAVLYVHMLARACQHAQGIARLHKRQRPVHQGFGLKGAVTLTILLGIFFLCWGPFFLHLTLIVLCPEHPTCGCIFKNFNLFLALIICNAIIDPLIYAFHSQELRRTLKEVLTCSW

SEQ ID NO: 502 - protein, 317 aa, Artificial Sequence [sequence omitted]

SEQ ID NO: 503 - protein, 317 aa, Artificial Sequence [sequence omitted]

SEQ ID NO: 504 - protein, 317 aa, Artificial Sequence [sequence omitted]

SEQ ID NO: 505 - protein, 317 aa, Artificial Sequence [sequence omitted]

SEQ ID NO: 506 - protein, 317 aa, Artificial Sequence [sequence omitted]

SEQ ID NO: 507 - protein, 317 aa, Artificial Sequence [sequence omitted]

SEQ ID NO: 508 - protein, 317 aa, Artificial Sequence [sequence omitted]

SEQ ID NO: 509 - protein, 317 aa, Artificial Sequence [sequence omitted]

SEQ ID NO: 510 - protein, 317 aa, Artificial Sequence [sequence omitted]

SEQ ID NO: 511 - protein, 317 aa, Artificial Sequence [sequence omitted]

SEQ ID NO: 512 - protein, 317 aa, Artificial Sequence [sequence omitted]

SEQ ID NO: 513 - protein, 317 aa, Artificial Sequence [sequence omitted]

SEQ ID NO: 514 - protein, 317 aa, Artificial Sequence
  MC1_R__Homo_sapiens__V9Q7F1
MAVQGSQRRLLGSLNSTPTAIPQLGLAANQTGARCLEVSISDGLFLSLGLVSLVENALVVATIAKNRNLHSPMYCFICCLALSDLLVSGSNVLETAVILLLEAGALVARAAVLQQLDNVIDVITCSSMLSSLCFLGAIAVDRYISIFYALRYHSTVTLPRARRAVAAIWVASVVFSTLFIAYYDHVAVLLCLVVFFLAMLVLMAVLYVHMLARACQHAQGIARLHKRQRPVHQGFGLKGAVTLTILLGIFFLCWGPFFLHLTLIVLCPEHPTCGCIFKNFNLFLALIICNAIIDPLIYAFHSQELRRTLKEVLTCSW

SEQ ID NO: 515 - protein, 317 aa, Artificial Sequence [sequence omitted]

SEQ ID NO: 516 - protein, 317 aa, Artificial Sequence [sequence omitted]

SEQ ID NO: 517 - protein, 317 aa, Artificial Sequence [sequence omitted]

SEQ ID NO: 518 - protein, 317 aa, Artificial Sequence [sequence omitted]

SEQ ID NO: 519 - protein, 317 aa, Artificial Sequence [sequence omitted]

SEQ ID NO: 520 - protein, 317 aa, Artificial Sequence [sequence omitted]

SEQ ID NO: 521 - protein, 317 aa, Artificial Sequence [sequence omitted]

SEQ ID NO: 522 - protein, 317 aa, Artificial Sequence [sequence omitted]

SEQ ID NO: 523 - protein, 317 aa, Artificial Sequence [sequence omitted]

SEQ ID NO: 524 - protein, 317 aa, Artificial Sequence [sequence omitted]

SEQ ID NO: 525 - protein, 317 aa, Artificial Sequence [sequence omitted]

SEQ ID NO: 526 - protein, 317 aa, Artificial Sequence [sequence omitted]

SEQ ID NO: 527 - protein, 317 aa, Artificial Sequence [sequence omitted]

SEQ ID NO: 528 - protein, 317 aa, Artificial Sequence [sequence omitted]

SEQ ID NO: 529 - protein, 317 aa, Artificial Sequence [sequence omitted]

SEQ ID NO: 530 - protein, 317 aa, Artificial Sequence [sequence omitted]

SEQ ID NO: 531 - protein, 630 aa, Artificial Sequence
  mesothelin__Homo_sapiens__Q13421
MALPTARPLLGSCGTPALGSLLFLLFSLGWVQPSRTLAGETGQEAAPLDGVLANPPNISSLSPRQLLGFPCAEVSGLSTERVRELAVALAQKNVKLSTEQLRCLAHRLSEPPEDLDALPLDLLLFLNPDAFSGPQACTRFFSRITKANVDLLPRGAPERQRLLPAALACWGVRGSLLSEADVRALGGLACDLPGRFVAESAEVLLPRLVSCPGPLDQDQQEAARAALQGGGPPYGPPSTWSVSTMDALRGLLPVLGQPIIRSIPQGIVAAWRQRSSRDPSWRQPERTILRPRFRREVEKTACPSGKKAREIDESLIFYKKWELEACVDAALLATQMDRVNAIPFTYEQLDVLKHKLDELYPQGYPESVIQHLGYLFLKMSPEDIRKWNVTSLETLKALLEVNKGHEMSPQAPRRPLPQVATLIDRFVKGRGQLDKDTLDTLTAFYPGYLCSLSPEELSSVPPSSIWAVRPQDLDTCDPRQLDVLYPKARLAFQNMNGSEYFVKIQSFLGGAPTEDLKALSQQNVSMDLATFMKLRTDAVLPLTVAEVQKLLGPHVEGLKAEERHRPVRDWILRQRQDDLDTLGLGLQGGIPNGYLVLDLSMQEALSGTPCLLGPGPVLTVLALLLASTLA

SEQ ID NO: 532 - protein, 504 aa, Artificial Sequence
  MITF__Homo_sapiens__O75030-8
MEALRVQMFMPCSFESLYLSSAEHPGASKPPISSSSMTSRILLRQQLMREQMQEQERREQQQKLQAAQFMQQRVPVSQTPAINVSVPTTLPSATQVPMEVLKVQTHLENPTKYHIQQAQRQQVKQYLSTTLANKHANQVLSLPCPNQPGDHVMPPVPGSSAPNSPMAMLTLNSNCEKEGFYKFEEQNRAESECPGMNTHSRASCMQMDDVIDDIISLESSYNEEILGLMDPALQMANTLPVSGNLIDLYGNQGLPPPGLTISNSCPANLPNIKRELTESEARALAKERQKKDNHNLIERRRRFNINDRIKELGTLIPKSNDPDMRWNKGTILKASVDYIRKLQREQQRAKELENRQKKLEHANRHLLLRIQELEMQARAHGLSLIPSTGLCSPDLVNRIIKQEPVLENCSQDLLQHHADLTCTTTLDLTDGTITFNNNLGTGTEANQAYSVPTKMGSKLEDILMDDTLSPVGVTDPLLSSVSPGASKTSSRRSSMSMEETEHTC

SEQ ID NO: 533 - protein, 419 aa, Artificial Sequence
  MITF__Homo_sapiens__O75030-9
MLEMLEYNHYQVQTHLENPTKYHIQQAQRQQVKQYLSTTLANKHANQVLSLPCPNQPGDHVMPPVPGSSAPNSPMAMLTLNSNCEKEGFYKFEEQNRAESECPGMNTHSRASCMQMDDVIDDIISLESSYNEEILGLMDPALQMANTLPVSGNLIDLYGNQGLPPPGLTISNSCPANLPNIKRELTACIFPTESEARALAKERQKKDNHNLIERRRRFNINDRIKELGTLIPKSNDPDMRWNKGTILKASVDYIRKLQREQQRAKELENRQKKLEHANRHLLLRIQELEMQARAHGLSLIPSTGLCSPDLVNRIIKQEPVLENCSQDLLQHHADLTCTTTLDLTDGTITFNNNLGTGTEANQAYSVPTKMGSKLEDILMDDTLSPVGVTDPLLSSVSPGASKTSSRRSSMSMEETEHTC

SEQ ID NO: 534 - protein, 526 aa, Artificial Sequence
  MITF__Homo_sapiens__O75030
MQSESGIVPDFEVGEEFHEEPKTYYELKSQPLKSSSSAEHPGASKPPISSSSMTSRILLRQQLMREQMQEQERREQQQKLQAAQFMQQRVPVSQTPAINVSVPTTLPSATQVPMEVLKVQTHLENPTKYHIQQAQRQQVKQYLSTTLANKHANQVLSLPCPNQPGDHVMPPVPGSSAPNSPMAMLTLNSNCEKEGFYKFEEQNRAESECPGMNTHSRASCMQMDDVIDDIISLESSYNEEILGLMDPALQMANTLPVSGNLIDLYGNQGLPPPGLTISNSCPANLPNIKRELTACIFPTESEARALAKERQKKDNHNLIERRRRFNINDRIKELGTLIPKSNDPDMRWNKGTILKASVDYIRKLQREQQRAKELENRQKKLEHANRHLLLRIQELEMQARAHGLSLIPSTGLCSPDLVNRIIKQEPVLENCSQDLLQHHADLTCTTTLDLTDGTITFNNNLGTGTEANQAYSVPTKMGSKLEDILMDDTLSPVGVTDPLLSSVSPGASKTSSRRSSMSMEETEHTC

SEQ ID NO: 535 - protein, 354 aa, Artificial Sequence [sequence omitted]

SEQ ID NO: 536 - protein, 267 aa, Artificial Sequence
  MMP7__Homo_sapiens__P09237
MRLTVLCAVCLLPGSLALPLPQEAGGMSELQWEQAQDYLKRFYLYDSETKNANSLEAKLKEMQKFFGLPITGMLNSRVIEIMQKPRCGVPDVAEYSLFPNSPKWTSKVVTYRIVSYTRDLPHITVDRLVSKALNMWGKEIPLHFRKVVWGTADIMIGFARGAHGDSYPFDGPGNTLAHAFAPGTGLGGDAHFDEDERWTDGSSLGINFLYAATHELGHSLGMGHSSDPNAVMYPTYGNGDPQNFKLSQDDIKGIQKLYGKRSNSRKK

SEQ ID NO: 537 - protein, 1255 aa, Artificial Sequence
  MUC-1__Homo_sapiens__AAA60019
MTPGTQSPFFLLLLLTVLTVVTGSGHASSTPGGEKETSATQRSSVPSSTEKNAVSMTSSVLSSHSPGSGSSTTQGQDVTLAPATEPASGSAATWGQDVTSVPVTRPALGSTTPPAHDVTSAPDNKPAPGSTAPPAHGVTSAPDTRPAPGSTAPPAHGVTSAPDTRPAPGSTAPPAHGVTSAPDTRPAPGSTAPPAHGVTSAPDTRPAPGSTAPPAHGVTSAPDTRPAPGSTAPPAHGVTSAPDTRPAPGSTAPPAHGVTSAPDTRPAPGSTAPPAHGVTSAPDTRPAPGSTAPPAHGVTSAPDTRPAPGSTAPPAHGVTSAPDTRPAPGSTAPPAHGVTSAPDTRPAPGSTAPPAHGVTSAPDTRPAPGSTAPPAHGVTSAPDTRPAPGSTAPPAHGVTSAPDTRPAPGSTAPPAHGVTSAPDTRPAPGSTAPPAHGVTSAPDTRPAPGSTAPPAHGVTSAPDTRPAPGSTAPPAHGVTSAPDTRPAPGSTAPPAHGVTSAPDTRPAPGSTAPPAHGVTSAPDTRPAPGSTAPPAHGVTSAPDTRPAPGSTAPPAHGVTSAPDTRPAPGSTAPPAHGVTSAPDTRPAPGSTAPPAHGVTSAPDTRPAPGSTAPPAHGVTSAPDTRPAPGSTAPPAHGVTSAPDTRPAPGSTAPPAHGVTSAPDTRPAPGSTAPPAHGVTSAPDTRPAPGSTAPPAHGVTSAPDTRPAPGSTAPPAHGVTSAPDTRPAPGSTAPPAHGVTSAPDTRPAPGSTAPPAHGVTSAPDTRPAPGSTAPPAHGVTSAPDTRPAPGSTAPPAHGVTSAPDTRPAPGSTAPPAHGVTSAPDTRPAPGSTAPPAHGVTSAPDTRPAPGSTAPPAHGVTSAPDTRPAPGSTAPPAHGVTSAPDTRPAPGSTAPPAHGVTSAPDTRPAPGSTAPPAHGVTSAPDTRPAPGSTAPPAHGVTSAPDNRPALGSTAPPVHNVTSASGSASGSASTLVHNGTSARATTTPASKSTPFSIPSHHSDTPTTLASHSTKTDASSTHHSSVPPLTSSNHSTSPQLSTGVSFFFLSFHISNLQFNSSLEDPSTDYYQELQRDISEMFLQIYKQGGFLGLSNIKFRPGSVVVQLTLAFREGTINVHDVETQFNQYKTEAASRYNLTISDVSVSDVPFPFSAQSGAGVPGWGIALLVLVCVLVALAIVYLIALAVCQCRRKNYGQLDIFPARDTYHPMSEYPTYHTHGRYVPPSSTDRSPYEKVSAGNGGSSLSYTNPAVAAASANL

SEQ ID NO: 538 - protein, 711 aa, Artificial Sequence
  MUM-1/m__Homo_sapiens__NP_116242
MMADAKYVLCRWEKRLWPAKVLARTATSTKNKRRKEYFLAVQILSLEEKIKVKSTEVEILEKSQIEAIASSLASQNEVPAAPLEELAYRRSLRVALDVLSEGSIWSQESSAGTGRADRSLRGKPMEHVSSPCDSNSSSLPRGDVLGSSRPHRRRPCVQQSLSSSFTCEKDPECKVDHKKGLRKSENPRGPLVLPAGGGAQDESGSRIHHKNWTLASKRGGNSAQKASLCLNGSSLSEDDTERDMGSKGGSWAAPSLPSGVREDDPCANAEGHDPGLPLGSLTAPPAPEPSACSEPGECPAKKRPRLDGSQRPPAVQLEPMAAGAAPSPGPGPGPRESVTPRSTARLGPPPSHASADATRCLPCPDSQKLEKECQSSEESMGSNSMRSILEEDEEDEEPPRVLLYHEPRSFEVGMLVWHKHKKYPFWPAVVKSVRQRDKKASVLYIEGHMNPKMKGFTVSLKSLKHFDCKEKQTLLNQAREDFNQDIGWCVSLITDYRVRLGCGSFAGSFLEYYAADISYPVRKSIQQDVLGTKLPQLSKGSPEEPVVGCPLGQRQPCRKMLPDRSRAARDRANQKLVEYIVKAKGAESHLRAILKSRKPSRWLQTFLSSSQYVTCVETYLEDEGQLDLVVKYLQGVYQEVGAKVLQRTNGDRIRFILDVLLPEAIICAISAVDEVDYKTAEEKYIKGPSLSYREKEIFDNQLLEERNRRRR

SEQ ID NO: 539 - protein, 145 aa, Artificial Sequence
  MUM-2/m__Homo_sapiens__Q9Y5R8
MTVHNLYLFDRNGVCLHYSEWHRKKQAGIPKEEEYKLMYGMLFSIRSFVSKMSPLDMKDGFLAFQTSRYKLHYYETPTGIKVVMNTDLGVGPIRDVLHHIYSALYVELVVKNPLCPLGQTVQSELFRSRLDSYVRSLPFFSARAG

SEQ ID NO: 540 - protein, 1043 aa, Artificial Sequence
  MYO1A__Homo_sapiens__Q9UBC5
MPLLEGSVGVEDLVLLEPLVEESLLKNLQLRYENKEIYTYIGNVVISVNPYQQLPIYGPEFIAKYQDYTFYELKPHIYALANVAYQSLRDRDRDQCILITGESGSGKTEASKLVMSYVAAVCGKGEQVNSVKEQLLQSNPVLEAFGNAKTIRNNNSSRFGKYMDIEFDFKGSPLGGVITNYLLEKSRLVKQLKGERNFHIFYQLLAGADEQLLKALKLERDTTGYAYLNHEVSRVDGMDDASSFRAVQSAMAVIGFSEEEIRQVLEVTSMVLKLGNVLVADEFQASGIPASGIRDGRGVREIGEMVGLNSEEVERALCSRTMETAKEKVVTALNVMQAQYARDALAKNIYSRLFDWIVNRINESIKVGIGEKKKVMGVLDIYGFEILEDNSFEQFVINYCNEKLQQVFIEMTLKEEQEEYKREGIPWTKVDYFDNGIICKLIEHNQRGILAMLDEECLRPGVVSDSTFLAKLNQLFSKHGHYESKVTQNAQRQYDHTMGLSCFRICHYAGKVTYNVTSFIDKNNDLLFRDLLQAMWKAQHPLLRSLFPEGNPKQASLKRPPTAGAQFKSSVAILMKNLYSKSPNYIRCIKPNEHQQRGQFSSDLVATQARYLGLLENVRVRRAGYAHRQGYGPFLERYRLLSRSTWPHWNGGDREGVEKVLGELSMSSGELAFGKTKIFIRSPKTLFYLEEQRRLRLQQLATLIQKIYRGWRCRTHYQLMRKSQILISSWFRGNMQKKCYGKIKASVLLIQAFVRGWKARKNYRKYFRSEAALTLADFIYKSMVQKFLLGLKNNLPSTNVLDKTWPAAPYKCLSTANQELQQLFYQWKCKRFRDQLSPKQVEILREKLCASELFKGKKASYPQSVPIPFCGDYIGLQGNPKLQKLKGGEEGPVLMAEAVKKVNRGNGKTSSRILLLTKGHVILTDTKKSQAKIVIGLDNVAGVSVTSLKDGLFSLHLSEMSSVGSKGDFLLVSEHVIELLTKMYRAVLDATQRQLTVTVTEKFSVRFKENSVAVKVVQGPAGGDNSKLRYKKKGSHCLEVTVQ

SEQ ID NO: 541 - protein, 1136 aa, Artificial Sequence
  MYO1B__Homo_sapiens__O43795
MAKMEVKTSLLDNMIGVGDMVLLEPLNEETFINNLKKRFDHSEIYTYIGSVVISVNPYRSLPIYSPEKVEEYRNRNFYELSPHIFALSDEAYRSLRDQDKDQCILITGESGAGKTEASKLVMSYVAAVCGKGAEVNQVKEQLLQSNPVLEAFGNAKTVRNDNSSRFGKYMDIEFDFKGDPLGGVISNYLLEKSRVVKQPRGERNFHVFYQLLSGASEELLNKLKLERDFSRYNYLSLDSAKVNGVDDAANFRTVRNAMQIVGFMDHEAESVLAVVAAVLKLGNIEFKPESRVNGLDESKIKDKNELKEICELTGIDQSVLERAFSFRTVEAKQEKVSTTLNVAQAYYARDALAKNLYSRLFSWLVNRINESIKAQTKVRKKVMGVLDIYGFEIFEDNSFEQFIINYCNEKLQQIFIELTLKEEQEEYIREDIEWTHIDYFNNAIICDLIENNTNGILAMLDEECLRPGTVTDETFLEKLNQVCATHQHFESRMSKCSRFLNDTSLPHSCFRIQHYAGKVLYQVEGFVDKNNDLLYRDLSQAMWKASHALIKSLFPEGNPAKINLKRPPTAGSQFKASVATLMKNLQTKNPNYIRCIKPNDKKAAHIFNEALVCHQIRYLGLLENVRVRRAGYAFRQAYEPCLERYKMLCKQTWPHWKGPARSGVEVLFNELEIPVEEYSFGRSKIFIRNPRTLFKLEDLRKQRLEDLATLIQKIYRGWKCRTHFLLMKKSQIVIAAWYRRYAQQKRYQQTKSSALVIQSYIRGWKARKILRELKHQKRCKEAVTTIAAYWHGTQARRELRRLKEEARNKHAIAVIWAYWLGSKARRELKRLKEEARRKHAVAVIWAYWLGLKVRREYRKFFRANAGKKIYEFTLQRIVQKYFLEMKNKMPSLSPIDKNWPSRPYLFLDSTHKELKRIFHLWRCKKYRDQFTDQQKLIYEEKLEASELFKDKKALYPSSVGQPFQGAYLEINKNPKYKKLKDAIEEKIIIAEVVNKINRANGKSTSRIFLLTNNNLLLADQKSGQIKSEVPLVDVTKVSMSSQNDGFFAVHLKEGSEAASKGDFLFSSDHLIEMATKLYRTTLSQTKQKLNIEISDEFLVQFRQDKVCVKFIQGNQKNGSVPTCKRKNNRLLEVAVP

SEQ ID NO: 542 - protein, 1063 aa, Artificial Sequence
  MYO1C__Homo_sapiens__O00159
MALQVELVPTGEIIRVVHPHRPCKLALGSDGVRVTMESALTARDRVGVQDFVLLENFTSEAAFIENLRRRFRENLIYTYIGPVLVSVNPYRDLQIYSRQHMERYRGVSFYEVPPHLFAVADTVYRALRTERRDQAVMISGESGAGKTEATKRLLQFYAETCPAPERGGAVRDRLLQSNPVLEAFGNAKTLRNDNSSRFGKYMDVQFDFKGAPVGGHILSYLLEKSRVVHQNHGERNFHIFYQLLEGGEEETLRRLGLERNPQSYLYLVKGQCAKVSSINDKSDWKVVRKALTVIDFTEDEVEDLLSIVASVLHLGNIHFAANEESNAQVTTENQLKYLTRLLSVEGSTLREALTHRKIIAKGEELLSPLNLEQAAYARDALAKAVYSRTFTWLVGKINRSLASKDVESPSWRSTTVLGLLDIYGFEVFQHNSFEQFCINYCNEKLQQLFIELTLKSEQEEYEAEGIAWEPVQYFNNKIICDLVEEKFKGIISILDEECLRPGEATDLTFLEKLEDTVKHHPHFLTHKLADQRTRKSLGRGEFRLLHYAGEVTYSVTGFLDKNNDLLFRNLKETMCSSKNPIMSQCFDRSELSDKKRPETVATQFKMSLLQLVEILQSKEPAYVRCIKPNDAKQPGRFDEVLIRHQVKYLGLLENLRVRRAGFAYRRKYEAFLQRYKSLCPETWPTWAGRPQDGVAVLVRHLGYKPEEYKMGRTKIFIRFPKTLFATEDALEVRRQSLATKIQAAWRGFHWRQKFLRVKRSAICIQSWWRGTLGRRKAAKRKWAAQTIRRLIRGFVLRHAPRCPENAFFLDHVRTSFLLNLRRQLPQNVLDTSWPTPPPALREASELLRELCIKNMVWKYCRSISPEWKQQLQQKAVASEIFKGKKDNYPQSVPRLFISTRLGTDEISPRVLQALGSEPIQYAVPVVKYDRKGYKPRSRQLLLTPNAVVIVEDAKVKQRIDYANLTGISVSSLSDSLFVLHVQRADNKQKGDVVLQSDHVIETLTKTALSANRVNSININQGSITFAGGPGRDGTIDFTPGSELLITKAKNGHLAVVAPRLNSR

SEQ ID NO: 543 - protein, 1006 aa, Artificial Sequence
  MYO1D__Homo_sapiens__O94832
MAEQESLEFGKADFVLMDTVSMPEFMANLRLRFEKGRIYTFIGEVVVSVNPYKLLNIYGRDTIEQYKGRELYERPPHLFAIADAAYKAMKRRSKDTCIVISGESGAGKTEASKYIMQYIAAITNPSQRAEVERVKNMLLKSNCVLEAFGNAKTNRNDNSSRFGKYMDINFDFKGDPIGGHINNYLLEKSRVIVQQPGERSFHSFYQLLQGGSEQMLRSLHLQKSLSSYNYIHVGAQLKSSINDAAEFRVVADAMKVIGFKPEEIQTVYKILAAILHLGNLKFVVDGDTPLIENGKVVSIIAELLSTKTDMVEKALLYRTVATGRDIIDKQHTEQEASYGRDAFAKAIYERLFCWIVTRINDIIEVKNYDTTIHGKNTVIGVLDIYGFEIFDNNSFEQFCINYCNEKLQQLFIQLVLKQEQEEYQREGIPWKHIDYFNNQIIVDLVEQQHKGIIAILDDACMNVGKVTDEMFLEALNSKLGKHAHFSSRKLCASDKILEFDRDFRIRHYAGDVVYSVIGFIDKNKDTLFQDFKRLMYNSSNPVLKNMWPEGKLSITEVTKRPLTAATLFKNSMIALVDNLASKEPYYVRCIKPNDKKSPQIFDDERCRHQVEYLGLLENVRVRRAGFAFRQTYEKFLHRYKMISEFTWPNHDLPSDKEAVKKLIERCGFQDDVAYGKTKIFIRTPRTLFTLEELRAQMLIRIVLFLQKVWRGTLARMRYKRTKAALTIIRYYRRYKVKSYIHEVARRFHGVKTMRDYGKHVKWPSPPKVLRRFEEALQTIFNRWRASQLIKSIPASDLPQVRAKVAAVEMLKGQRADLGLQRAWEGNYLASKPDTPQTSGTFVPVANELKRKDKYMNVLFSCHVRKVNRFSKVEDRAIFVTDRHLYKMDPTKQYKVMKTIPLYNLTGLSVSNGKDQLVVFHTKDNKDLIVCLFSKQPTHESRIGELVGVLVNHFKSEKRHLQVNVTNPVQCSLHGKKCTVSVETRLNQPQPDFTKNRSGFILSVPGN

SEQ ID NO: 544 - protein, 1108 aa, Artificial Sequence
  MYO1E__Homo_sapiens__Q12965
MGSKGVYQYHWQSHNVKHSGVDDMVLLSKITENSIVENLKKRYMDDYIFTYIGSVLISVNPFKQMPYFGEKEIEMYQGAAQYENPPHIYALADNMYRNMIIDRENQCVIISGESGAGKTVAAKYIMSYISRVSGGGTKVQHVKDIILQSNPLLEAFGNAKTVRNNNSSRFGKYFEIQFSPGGEPDGGKISNFLLEKSRVVMRNPGERSFHIFYQLIEGASAEQKHSLGITSMDYYYYLSLSGSYKVDDIDDRREFQETLHAMNVIGIFAEEQTLVLQIVAGILHLGNISFKEVGNYAAVESEEFLAFPAYLLGINQDRLKEKLTSRQMDSKWGGKSESIHVTLNVEQACYTRDALAKALHARVFDFLVDSINKAMEKDHEEYNIGVLDIYGFEIFQKNGFEQFCINFVNEKLQQIFIELTLKAEQEEYVQEGIRWTPIEYFNNKIVCDLIENKVNPPGIMSILDDVCATMHAVGEGADQTLLQKLQMQIGSHEHFNSWNQGFIIHHYAGKVSYDMDGFCERNRDVLFMDLIELMQSSELPFIKSLFPENLQADKKGRPTTAGSKIKKQANDLVSTLMKCTPHYIRCIKPNETKKPRDWEESRVKHQVEYLGLKENIRVRRAGYAYRRIFQKFLQRYAILTKATWPSWQGEEKQGVLHLLQSVNMDSDQFQLGRSKVFIKAPESLFLLEEMRERKYDGYARVIQKSWRKFVARKKYVQMREEASDLLLNKKERRRNSINRNFIGDYIGMEEHPELQQFVGKREKIDFADTVTKYDRRFKGVKRDLLLTPKCLYLIGREKVKQGPDKGLVKEVLKRKIEIERILSVSLSTMQDDIFILHEQEYDSLLESVFKTEFLSLLAKRYEEKTQKQLPLKFSNTLELKLKKENWGPWSAGGSRQVQFHQGFGDLAVLKPSNKVLQVSIGPGLPKNSRPTRRNTTQNTGYSSGTQNANYPVRAAPPPPGYHQNGVIRNQYVPYPHAPGSQRSNQKSLYTSMARPPLPRQQSTSSDRVSQTPESLDFLKVPDQGAAGVRRQTTSRPPPAGGRPKPQPKPKPQVPQCKALYAYDAQDTDELSFNANDIIDIIKEDPSGWWTGRLRGKQGLFPNNYVTKI

SEQ ID NO: 545 - protein, 1098 aa, Artificial Sequence
  MYO1F__Homo_sapiens__O00160
MGSKERFHWQSHNVKQSGVDDMVLLPQITEDAIAANLRKRFMDDYIFTYIGSVLISVNPFKQMPYFTDREIDLYQGAAQYENPPHIYALTDNMYRNMLIDCENQCVIISGESGAGKTVAAKYIMGYISKVSGGGEKVQHVKDIILQSNPLLEAFGNAKTVRNNNSSRFGKYFEIQFSRGGEPDGGKISNFLLEKSRVVMQNENERNFHIYYQLLEGASQEQRQNLGLMTPDYYYYLNQSDTYQVDGTDDRSDFGETLSAMQVIGIPPSIQQLVLQLVAGILHLGNISFCEDGNYARVESVDLLAFPAYLLGIDSGRLQEKLTSRKMDSRWGGRSESINVTLNVEQAAYTRDALAKGLYARLFDFLVEAINRAMQKPQEEYSIGVLDIYGFEIFQKNGFEQFCINFVNEKLQQIFIELTLKAEQEEYVQEGIRWTPIQYFNNKVVCDLIENKLSPPGIMSVLDDVCATMHATGGGADQTLLQKLQAAVGTHEHFNSWSAGFVIHHYAGKVSYDVSGFCERNRDVLFSDLIELMQTSEQAFLRMLFPEKLDGDKKGRPSTAGSKIKKQANDLVATLMRCTPHYIRCIKPNETKRPRDWEENRVKHQVEYLGLKENIRVRRAGFAYRRQFAKFLQRYAILTPETWPRWRGDERQGVQHLLRAVNMEPDQYQMGSTKVFVKNPESLFLLEEVRERKFDGFARTIQKAWRRHVAVRKYEEMREEASNILLNKKERRRNSINRNFVGDYLGLEERPELRQFLGKRERVDFADSVTKYDRRFKPIKRDLILTPKCVYVIGREKVKKGPEKGQVCEVLKKKVDIQALRGVSLSTRQDDFFILQEDAADSFLESVFKTEFVSLLCKRFEEATRRPLPLTFSDTLQFRVKKEGWGGGGTRSVTFSRGFGDLAVLKVGGRTLTVSVGDGLPKSSKPTRKGMAKGKPRRSSQAPTRAAPAPPRGMDRNGVPPSARGGPLPLEIMSGGGTHRPPRGPPSTSLGASRRPRARPPSEHNTEFLNVPDQGMAGMQRKRSVGQRPVPGVGRPKPQPRTHGPRCRALYQYVGQDVDELSFNVNEVIEILMEDPSGWWKGRLHGQEGLFPGNYVEKI

SEQ ID NO: 546 - protein, 1018 aa, Artificial Sequence
  MYO1G__Homo_sapiens__B0I1T2
MEDEEGPEYGKPDFVLLDQVTMEDFMRNLQLRFEKGRIYTYIGEVLVSVNPYQELPLYGPEAIARYQGRELYERPPHLYAVANAAYKAMKHRSRDTCIVISGESGAGKTEASKHIMQYIAAVTNPSQRAEVERVKDVLLKSTCVLEAFGNARTNRNHNSSRFGKYMDINFDFKGDPIGGHIHSYLLEKSRVLKQHVGERNFHAFYQLLRGSEDKQLHELHLERNPAVYNFTHQGAGLNMTVHSALDSDEQSHQAVTEAMRVIGFSPEEVESVHRILAAILHLGNIEFVETEEGGLQKEGLAVAEEALVDHVAELTATPRDLVLRSLLARTVASGGRELIEKGHTAAEASYARDACAKAVYQRLFEWVVNRINSVMEPRGRDPRRDGKDTVIGVLDIYGFEVFPVNSFEQFCINYCNEKLQQLFIQLILKQEQEEYEREGITWQSVEYFNNATIVDLVERPHRGILAVLDEACSSAGTITDRIFLQTLDMHHRHHLHYTSRQLCPTDKTMEFGRDFRIKHYAGDVTYSVEGFIDKNRDFLFQDFKRLLYNSTDPTLRAMWPDGQQDITEVTKRPLTAGTLFKNSMVALVENLASKEPFYVRCIKPNEDKVAGKLDENHCRHQVAYLGLLENVRVRRAGFASRQPYSRFLLRYKMTCEYTWPNHLLGSDKAAVSALLEQHGLQGDVAFGHSKLFIRSPRTLVTLEQSRARLIPIIVLLLQKAWRGTLARWRCRRLRAIYTIMRWFRRHKVRAHLAELQRRFQAARQPPLYGRDLVWPLPPAVLQPFQDTCHALFCRWRARQLVKNIPPSDMPQIKAKVAAMGALQGLRQDWGCRRAWARDYLSSATDNPTASSLFAQRLKTLQDKDGFGAVLFSSHVRKVNRFHKIRNRALLLTDQHLYKLDPDRQYRVMRAVPLEAVTGLSVTSGGDQLVVLHARGQDDLVVCLHRSRPPLDNRVGELVGVLAAHCQGEGRTLEVRVSDCIPLSHRGVRRLISVEPRPEQPEPDFRCARGSFTLLWPSR

SEQ ID NO: 547 - protein, 1022 aa, Artificial Sequence
  MYO1H__Homo_sapiens__NP_001094891
MEGALTARDKVGVQDFVLLDAYTSESAFVDNLRKRFSENLIYTYIGTLLVSVNPYQELGIYTVSQMELYQGVNFFELPPHVYAIADNAYRMMCAELNNHFILISGESGAGKTEASKKILEYFAVTCPMTQSLQIARDRLLFSNPVLEAFGNARTLRNDNSSRFGKYMDIQFDFQGIPVGGHIISYLIEKSRVVYQNEGERNFHIFYQLLAGGEEERLSYLGLERDPQLYKYLSQGHCAKESSISDKNDWKTVSNAFSVIDFTEADLENLFGIIASVLHLGNIGFEEDDQGCATIPDTHEIKWIAKLLGVHPSVLLEALTHRKIEAKTEEVICPLTLELSVYARDAMAKAVYGRTFTWLVNKINSSLVNKDFTRKTVIGLLDIYGFEVFDKNGFEQFCINYCNEKLQQLLIERTLKAEQAEYEMEGIEWEPIKYFNNKIICDLVEERHKGIISILDEECIRPGPATDLSFLEKLEEKVGKHAHFETRKLAGPKGRKRIGWMEFRLLHYAGEVTYCTKGFLEKNNDLLYRHLKEVLCKSKNIILRECFLLAELENRRRPPTVGTQFKNSLSSLLETLISKEPSYIRCIKPNDRKEPSKFDDFLIRHQIKYLGLMEHLRVRRAGFAYRRKYEHFLQRYKSLCPDTWPHWHGPPAEGVERLIKYIGYKPEEYKLGKTKIFIRFPRTLFATEDAFEFSKHQLVARIQATYKRCLGRREYVKKRQAAIKLEAHWRGALARKAIQRRKWAVRIIRKFIKGFISRNKPLCPDNEEFIVFVRKNYILNLRYHLPKTVLDKSWLRPPGILENASDLLRKMCVRNLVQKYCRGITAERKAMMQQKVVTSEIFRGRKDGYTESLNQPFVNSRIDEGDINPKVLQLISHEKIQYGVPVIKYDRKGFKARQRQLILTQKAAYVVELAKIKQKIEYSALKGVSTSNLSDGILVIHVSPEDSKQKGDAVLQCGHVFEAVTKLVMLVKKENIVNVVQGSLQFFISPGKEGTIVFDTGLEEQVYKNKNGQLTVVSVRRKS

SEQ ID NO: 548 - protein, 792 aa, Artificial Sequence
  NA17__Homo_sapiens__Q3V5L5
MITVNPDGKIMVRRCLVTLRPFRLFVLGIGFFTLCFLMTSLGGQFSARRLGDSPFTIRTEVMGGPESRGVLRKMSDLLELMVKRMDALARLENSSELHRAGGDLHFPADRMPPGAGLMERIQAIAQNVSDIAVKVDQILRHSLLLHSKVSEGRRDQCEAPSDPKFPDCSGKVEWMRARWTSDPCYAFFGVDGTECSFLIYLSEVEWFCPPLPWRNQTAAQRAPKPLPKVQAVFRSNLSHLLDLMGSGKESLIFMKKRTKRLTAQWALAAQRLAQKLGATQRDQKQILVHIGFLTEESGDVFSPRVLKGGPLGEMVQWADILTALYVLGHGLRVTVSLKELQSNLGVPPGRGSCPLTMPLPFDLIYTDYHGLQQMKRHMGLSFKKYRCRIRVIDTFGTEPAYNHEEYATLHGYRTNWGYWNLNPKQFMTMFPHTPDNSFMGFVSEELNETEKRLIKGGKASNMAVVYGKEASIWKLQGKEKFLGILNKYMEIHGTVYYESQRPPEVPAFVKNHGLLPQPEFQQLLRKAKLFIGFGFPYEGPAPLEAIANGCIFLQSRFSPPHSSLNHEFFRGKPTSREVFSQHPYAENFIGKPHVWTVDYNNSEEFEAAIKAIMRTQVDPYLPYEYTCEGMLERIHAYIQHQDFCRAPDPALPEAHAPQSPFVLAPNATHLEWARNTSLAPGAWPPAHALRAWLAVPGRACTDTCLDHGLICEPSFFPFLNSQDAFLKLQVPCDSTESEMNHLYPAFAQPGQECYLQKEPLLFSCAGSNTKYRRLCPCRDFRKGQVALCQGCL

SEQ ID NO: 549 - protein, 11 aa, Artificial Sequence
  NA88-A__Homo_sapiens__10790436
MTQGQHFLQKV

SEQ ID NO: 550 - protein, 736 aa, Artificial Sequence
  Neo-PAP__Homo_sapiens__Q9BWT3
MKEMSANTVLDSQRQQKHYGITSPISLASPKEIDHIYTQKLIDAMKPFGVFEDEEELNHRLVVLGKLNNLVKEWISDVSESKNLPPSVVATVGGKIFTFGSYRLGVHTKGADIDALCVAPRHVERSDFFQSFFEKLKHQDGIRNLRAVEDAFVPVIKFEFDGIEIDLVFARLAIQTISDNLDLRDDSRLRSLDIRCIRSLNGCRVTDEILHLVPNKETFRLTLRAVKLWAKRRGIYSNMLGFLGGVSWAMLVARTCQLYPNAAASTLVHKFFLVFSKWEWPNPVLLKQPEESNLNLPVWDPRVNPSDRYHLMPIITPAYPQQNSTYNVSTSTRTVMVEEFKQGLAVTDEILQGKSDWSKLLEPPNFFQKYRHYIVLTASASTEENHLEWVGLVESKIRVLVGNLERNEFITLAHVNPQSFPGNKEHHKDNNYVSMWFLGIIFRRVENAESVNIDLTYDIQSFTDTVYRQANNINMLKEGMKIEATHVKKKQLHHYLPAEILQKKKKQSLSDVNRSSGGLQSKRLSLDSSCLDSSRDTDNGTPFNSPASKSDSPSVGETERNSAEPAAVIVEKPLSVPPAQGLSIPVIGAKVDSTVKTVSPPTVCTIPTVVGRNVIPRITTPHNPAQGQPHLNGMSNITKTVTPKRSHSPSIDGTPKRLKDVEKFIRLESTFKDPRTAEERKRKSVDAIGGESMPIPTIDTSRKKRLPSKELPDSSSPVPANNIRVIKNSIRLTLNR

SEQ ID NO: 551 - protein, 458 aa, Artificial Sequence
  NFYC/m__Homo_sapiens__Q13952
MSTEGGFGGTSSSDAQQSLQSFWPRVMEEIRNLTVKDFRVQELPLARIKKIMKLDEDVKMISAEAPVLFAKAAQIFITELTLRAWIHTEDNKRRTLQRNDIAMAITKFDQFDFLIDIVPRDELKPPKRQEEVRQSVTPAEPVQYYFTLAQQPTAVQVQGQQQGQQTTSSTTTIQPGQIIIAQPQQGQTTPVTMQVGEGQQVQIVQAQPQGQAQQAQSGTGQTMQVMQQIITNTGEIQQIPVQLNAGQLQYIRLAQPVSGTQVVQGQIQTLATNAQQGQRNASQGKPRRCLKETLQITQTEVQQGQQQFSQFTDGQRNSVQQARVSELTGEAEPREVKATGNSTPCTSSLPTTHPPSHRAGASCVCCSQPQQSSTSPPPSDALQWVVVEVSGTPNQLETHRELHAPLPGMTSLSPLHPSQQLYQIQQVTMPAGQDLAQPMFIQSANQPSDGQAPQVTGD

SEQ ID NO: 552 - protein, 933 aa, Artificial Sequence
  NGEP__Homo_sapiens__Q6IWH7
MRMAATAWAGLQGPPLPTLCPAVRTGLYCRDQAHAERWAMTSETSSGSHCARSRMLRRRAQEEDSTVLIDVSPPEAEKRGSYGSTAHASEPGGQQAAACRAGSPAKPRIADFVLVWEEDLKLDRQQDSAARDRTDMHRTWRETFLDNLRAAGLCVDQQDVQDGNTTVHYALLSASWAVLCYYAEDLRLKLPLQELPNQASNWSAGLLAWLGIPNVLLEVVPDVPPEYYSCRFRVNKLPRFLGSDNQDTFFTSTKRHQILFEILAKTPYGHEKKNLLGIHQLLAEGVLSAAFPLHDGPFKTPPEGPQAPRLNQRQVLFQHWARWGKWNKYQPLDHVRRYFGEKVALYFAWLGFYTGWLLPAAVVGTLVFLVGCFLVFSDIPTQELCGSKDSFEMCPLCLDCPFWLLSSACALAQAGRLFDHGGTVFFSLFMALWAVLLLEYWKRKSATLAYRWDCSDYEDTEERPRPQFAASAPMTAPNPITGEDEPYFPERSRARRMLAGSVVIVVMVAVVVMCLVSIILYRAIMAIVVSRSGNTLLAAWASRIASLTGSVVNLVFILILSKIYVSLAHVLTRWEMHRTQTKFEDAFTLKVFIFQFVNFYSSPVYIAFFKGRFVGYPGNYHTLFGVRNEECAAGGCLIELAQELLVIMVGKQVINNMQEVLIPKLKGWWQKFRLRSKKRKAGASAGASQGPWEDDYELVPCEGLFDEYLEMVLQFGFVTIFVAACPLAPLFALLNNWVEIRLDARKFVCEYRRPVAERAQDIGIWFHILAGLTHLAVISNAFLLAFSSDFLPRAYYRWTRAHDLRGFLNFTLARAPSSFAAAHNRTCRYRAFRDDDGHYSQTYWNLLAIRLAFVIVFEHVVFSVGRLLDLLVPDIPESVEIKVKREYYLAKQALAENEVLFGTNGTKDEQPEGSELSSHWTPFTVPKASQLQQ

SEQ ID NO: 553 - protein, 294 aa, Artificial Sequence
  NPM__Homo_sapiens__P06748
MEDSMDMDMSPLRPQNYLFGCELKADKDYHFKVDNDENEHQLSLRTVSLGAGAKDELHIVEAEAMNYEGSPIKVTLATLKMSVQPTVSLGGFEITPPVVLRLKCGSGPVHISGQHLVAVEEDAESEDEEEEDVKLLSISGKRSAPGGGSKVPQKKVKLAADEDDDDDDEEDDDEDDDDDDFDDEEAEEKAPVKKSIRDTPAKNAQKSNQNGKDSKPSSTPRSKGQESFKKQEKTPKTPKGPSSVEDIKAKMQASIEKGGSLPKVEAKFINYVKNCFRMTDQEAIQDLWQWRKSL

SEQ ID NO: 554 - protein, 1304 aa, Artificial Sequence
  NRCAM__Homo_sapiens__Q92823
MQLKIMPKKKRLSAGRVPLILFLCQMISALEVPLDPKLLEDLVQPPTITQQSPKDYIIDPRENIVIQCEAKGKPPPSFSWTRNGTHFDIDKDPLVTMKPGTGTLIINIMSEGKAETYEGVYQCTARNERGAAVSNNIVVRPSRSPLWTKEKLEPITLQSGQSLVLPCRPPIGLPPPIIFWMDNSFQRLPQSERVSQGLNGDLYFSNVLPEDTREDYICYARFNHTQTIQQKQPISVKVISVDELNDTIAANLSDTEFYGAKSSRERPPTFLTPEGNASNKEELRGNVLSLECIAEGLPTPIIYWAKEDGMLPKNRTVYKNFEKTLQIIHVSEADSGNYQCIAKNALGAIHHTISVRVKAAPYWITAPQNLVLSPGEDGTLICRANGNPKPRISWLTNGVPIEIAPDDPSRKIDGDTIIFSNVQERSSAVYQCNASNEYGYLLANAFVNVLAEPPRILTPANTLYQVIANRPALLDCAFFGSPLPTIEWFKGAKGSALHEDIYVLHENGTLEIPVAQKDSTGTYTCVARNKLGMAKNEVHLEIKDPTWIVKQPEYAVVQRGSMVSFECKVKHDHTLSLTVLWLKDNRELPSDERFTVDKDHLVVADVSDDDSGTYTCVANTTLDSVSASAVLSVVAPTPTPAPVYDVPNPPFDLELTDQLDKSVQLSWTPGDDNNSPITKFIIEYEDAMHKPGLWHHQTEVSGTQTTAQLKLSPYVNYSFRVMAVNSIGKSLPSEASEQYLTKASEPDKNPTAVEGLGSEPDNLVITWKPLNGFESNGPGLQYKVSWRQKDGDDEWTSVVVANVSKYIVSGTPTFVPYLIKVQALNDMGFAPEPAVVMGHSGEDLPMVAPGNVRVNVVNSTLAEVHWDPVPLKSIRGHLQGYRIYYWKTQSSSKRNRRHIEKKILTFQGSKTHGMLPGLEPFSHYTLNVRVVNGKGEGPASPDRVFNTPEGVPSAPSSLKIVNPTLDSLTLEWDPPSHPNGILTEYTLKYQPINSTHELGPLVDLKIPANKTRWTLKNLNFSTRYKFYFYAQTSAGSGSQITEEAVTTVDEAGILPPDVGAGKVQAVNPRISNLTAAAAETYANISWEYEGPEHVNFYVEYGVAGSKEEWRKEIVNGSRSFFGLKGLMPGTAYKVRVGAVGDSGFVSSEDVFETGPAMASRQVDIATQGWFIGLMCAVALLILILLIVCFIRRNKGGKYPVKEKEDAHADPEIQPMKEDDGTFGEYSDAEDHKPLKKGSRTPSDRTVKKEDSDDSLVDYGEGVNGQFNEDGSFIGQYSGKKEKEPAEGNESSEAPSPVNAMNSFV

SEQ ID NO: 555 - protein, 434 aa, Artificial Sequence
  NSE__Homo_sapiens__P09104
MSIEKIWAREILDSRGNPTVEVDLYTAKGLFRAAVPSGASTGIYEALELRDGDKQRYLGKGVLKAVDHINSTIAPALISSGLSVVEQEKLDNLMLELDGTENKSKFGANAILGVSLAVCKAGAAERELPLYRHIAQLAGNSDLILPVPAFNVINGGSHAGNKLAMQEFMILPVGAESFRDAMRLGAEVYHTLKGVIKDKYGKDATNVGDEGGFAPNILENSEALELVKEAIDKAGYTEKIVIGMDVAASEFYRDGKYDLDFKSPTDPSRYITGDQLGALYQDFVRDYPVVSIEDPFDQDDWAAWSKFTANVGIQIVGDDLTVTNPKRIERAVEEKACNCLLLKVNQIGSVTEAIQACKLAQENGWGVMVSHRSGETEDTFIADLVVGLCTGQIKTGAPCRSERLAKYNQLMRIEEELGDEARFAGHNFRNPSVL

SEQ ID NO: 556 - protein, 464 aa, Artificial Sequence
  NUF2__Homo_sapiens__Q9BZD4
METLSFPRYNVAEIVIHIRNKILTGADGKNLTKNDLYPNPKPEVLHMIYMRALQIVYGIRLEHFYMMPVNSEVMYPHLMEGFLPFSNLVTHLDSFLPICRVNDFETADILCPKAKRTSRFLSGIINFIHFREACRETYMEFLWQYKSSADKMQQLNAAHQEALMKLERLDSVPVEEQEEFKQLSDGIQELQQSLNQDFHQKTIVLQEGNSQKKSNISEKTKRLNELKLSVVSLKEIQESLKTKIVDSPEKLKNYKEKMKDTVQKLKNARQEVVEKYEIYGDSVDCLPSCQLEVQLYQKKIQDLSDNREKLASILKESLNLEDQIESDESELKKLKTEENSFKRLMIVKKEKLATAQFKINKKHEDVKQYKRTVIEDCNKVQEKRGAVYERVTTINQEIQKIKLGIQQLKDAAEREKLKSQEIFLNLKTALEKYHDGIEKAAEDSYAKIDEKTAELKRKMFKMST

SEQ ID NO: 557 - protein, 180 aa, Artificial Sequence; identical to SEQ ID NO: 151
  NY-ESO-1__Homo_sapiens__P78358

SEQ ID NO: 558 - protein, 404 aa, Artificial Sequence
  OA1__Homo_sapiens__P51810
MASPRLGTFCCPTRDAATQLVLSFQPRAFHALCLGSGGLRLALGLLQLLPGRRPAGPGSPATSPPASVRILRAAAACDLLGCLGMVIRSTVWLGFPNFVDSVSDMNHTEIWPAAFCVGSAMWIQLLYSACFWWLFCYAVDAYLVIRRSAGLSTILLYHIMAWGLATLLCVEGAAMLYYPSVSRCERGLDHAIPHYVTMYLPLLLVLVANPILFQKTVTAVASLLKGRQGIYTENERRMGAVIKIRFFKIMLVLIICWLSNIINESLLFYLEMQTDINGGSLKPVRTAAKTTWFIMGILNPAQGFLLSLAFYGWTGCSLGFQSPRKEIQWESLTTSAAEGAHPSPLMPHENPASGKVSQVGGQTSDEALSMLSEGSDASTIEIHTASESCNKNEGDPALPTHGDL

SEQ ID NO: 559 - protein, 1046 aa, Artificial Sequence
  OGT__Homo_sapiens__O15294
MASSVGNVADSTEPTKRMLSFQGLAELAHREYQAGDFEAAERHCMQLWRQEPDNTGVLLLLSSIHFQCRRLDRSAHFSTLAIKQNPLLAEAYSNLGNVYKERGQLQEAIEHYRHALRLKPDFIDGYINLAAALVAAGDMEGAVQAYVSALQYNPDLYCVRSDLGNLLKALGRLEEAKACYLKAIETQPNFAVAWSNLGCVFNAQGEIWLAIHHFEKAVTLDPNFLDAYINLGNVLKEARIFDRAVAAYLRALSLSPNHAVVHGNLACVYYEQGLIDLAIDTYRRAIELQPHFPDAYCNLANALKEKGSVAEAEDCYNTALRLCPTHADSLNNLANIKREQGNIEEAVRLYRKALEVFPEFAAAHSNLASVLQQQGKLQEALMHYKEAIRISPTFADAYSNMGNTLKEMQDVQGALQCYTRAIQINPAFADAHSNLASIHKDSGNIPEAIASYRTALKLKPDFPDAYCNLAHCLQIVCDWTDYDERMKKLVSIVADQLEKNRLPSVHPHHSMLYPLSHGFRKAIAERHGNLCLDKINVLHKPPYEHPKDLKLSDGRLRVGYVSSDFGNHPTSHLMQSIPGMHNPDKFEVFCYALSPDDGTNFRVKVMAEANHFIDLSQIPCNGKAADRIHQDGIHILVNMNGYTKGARNELFALRPAPIQAMWLGYPGTSGALFMDYIITDQETSPAEVAEQYSEKLAYMPHTFFIGDHANMFPHLKKKAVIDFKSNGHIYDNRIVLNGIDLKAFLDSLPDVKIVKMKCPDGGDNADSSNTALNMPVIPMNTIAEAVIEMINRGQIQITINGFSISNGLATTQINNKAATGEEVPRTIIVTTRSQYGLPEDAIVYCNFNQLYKIDPSTLQMWANILKRVPNSVLWLLRFPAVGEPNIQQYAQNMGLPQNRIIFSPVAPKEEHVRRGQLADVCLDTPLCNGHTTGMDVLWAGTPMVTMPGETLASRVAASQLTCLGCLELIAKNRQEYEDIAVKLGTDLEYLKKVRGKVWKQRISSPLFNTKQYTMELERLYLQMWEHYAAGNKPDHMIKPVEVTESA

SEQ ID NO: 560 - protein, 146 aa, Artificial Sequence [sequence omitted]

SEQ ID NO: 561 - protein, 406 aa, Artificial Sequence
  OS-9__Homo_sapiens__B4E321
MAAETLLSSLLGLLLLGLLLPASLTGGVGSLNLEELSEMRYGIEILPLPVMGGQSQSSDVVIVSSKYKQRYECRLPAGAIHFQREREEETPAYQGPGIPELLSPMRDAPCLLKTKDWWTYEFCYGRHIQQYHMEDSASGAPNDFQNNVQVKVIRSPADLIRFIEELKGGTKKGKPNIGQEQPVDDAAEVPQREPEKERGDPERQREMEEEEDEDEDEDEDEDERQLLGEFEKELEGILLPSDRDRLRSEVKAGMERELENIIQETEKELDPDGLKKESERDRAMLALTSTLNKLIKRLEEKQSPELVKKHKKKRVVPKKPPPSPQPTGKIEIKIVRPWAEGTEEGARWLTDEDTRNLKEIFFNILVPGAEEAQKERQRQKELESNYRRVWGSPGGEGTGDLDEFDF

SEQ ID NO: 562 - protein, 740 aa, Artificial Sequence
  OS-9__Homo_sapiens__B7Z8E7
MAVETLLSSLLGLLLLGLLLPASLTGGVGSLNLEELSEMRYGIEILPLPVMGGQSQSSDVVIVSSKYKQRYECRLPAGAIHFQREREEETPAYQGPGIPELLSPMRDAPCLLKTKDWWTYEFCYGRHIQQYHMEDSEIKGEVLYLGYYQSAFDWDDETAKASKQHRLKRYHSQTYGNGSKCDLNGRPREAEVRFLCDEGAGISGDYIDRVDEPLSCSYVLTIRTPRLCPHPLLRPPPSAAPQAILCHPSLQPEEYMAYVQRQADSKQYGDKIIEELQDLGPQVWSETKSGVAPQKMAGRTLFHLFREIHFHFFPSPDLTVLTDWWGGGGVEKYHGPSSLGDRGGEGTPSYLLPSVSPLLSDQSLPVLCTLGASPTKDDSKDSDFWKMLNEPEDQAPGGEEVPAEEQDPSPEAADSASGAPNDFQNNVQVKVIRSPADLIRFIEELKGGTKKGKPNIGQEQPVDDAAEVPQREPEKERGDPERQREMEEEEDEDEDEDEDEDERQLLGEFEKELEGILLPSDRDRLRSEVKAGMERELENIIQETEKELDPDGLKKESERDRAMLALTSTLNKLIKRLEEKQSPELVKKHKKKRVVPKKPPPSPQPTEEDPEHRVRVRVTKLRLGGPNQDLTVLEMKRENPQLKQIEGLVKELLEREGLTAAGKIEIKIVRPWAEGTEEGARWLTDEDTRNLKEIFFNILVPGAEEAQKERQRQKELESNYRRVWGSPGGEGTGDLDEFDF

SEQ ID NO: 563 - protein, 667 aa, Artificial Sequence
  OS-9__Homo_sapiens__Q13438
MAAETLLSSLLGLLLLGLLLPASLTGGVGSLNLEELSEMRYGIEILPLPVMGGQSQSSDVVIVSSKYKQRYECRLPAGAIHFQREREEETPAYQGPGIPELLSPMRDAPCLLKTKDWWTYEFCYGRHIQQYHMEDSEIKGEVLYLGYYQSAFDWDDETAKASKQHRLKRYHSQTYGNGSKCDLNGRPREAEVRFLCDEGAGISGDYIDRVDEPLSCSYVLTIRTPRLCPHPLLRPPPSAAPQAILCHPSLQPEEYMAYVQRQADSKQYGDKIIEELQDLGPQVWSETKSGVAPQKMAGASPTKDDSKDSDFWKMLNEPEDQAPGGEEVPAEEQDPSPEAADSASGAPNDFQNNVQVKVIRSPADLIRFIEELKGGTKKGKPNIGQEQPVDDAAEVPQREPEKERGDPERQREMEEEEDEDEDEDEDEDERQLLGEFEKELEGILLPSDRDRLRSEVKAGMERELENIIQETEKELDPDGLKKESERDRAMLALTSTLNKLIKRLEEKQSPELVKKHKKKRVVPKKPPPSPQPTEEDPEHRVRVRVTKLRLGGPNQDLTVLEMKRENPQLKQIEGLVKELLEREGLTAAGKIEIKIVRPWAEGTEEGARWLTDEDTRNLKEIFFNILVPGAEEAQKERQRQKELESNYRRVWGSPGGEGTGDLDEFDF

SEQ ID NO: 564 - protein, 100 aa, Artificial Sequence
  osteocalcin__Homo_sapiens__P02818
MRALTLLALLALAALCIAGQAGAKPSGAESSKGAAFVSKQEGSEVVKRPRRYLYQWLGAPVPYPDPLEPRREVCELNPDCDELADHIGFQEAYRRFYGPV

SEQ ID NO: 565 - protein, 314 aa, Artificial Sequence
  osteopontin__Homo_sapiens__A0A024RDE2
MRIAVICFCLLGITCAIPVKQADSGSSEEKQLYNKYPDAVATWLNPDPSQKQNLLAPQNAVSSEETNDFKQETLPSKSNESHDHMDDMDDEDDDDHVDSQDSIDSNDSDDVDDTDDSHQSDESHHSDESDELVTDFPTDLPATEVFTPVVPTVDTYDGRGDSVVYGLRSKSKKFRRPDIQYPDATDEDITSHMESEELNGAYKAIPVAQDLNAPSDWDSRGKDSYETSQLDDQSAETHSHKQSRLYKRKANDESNEHSDVIDSQELSKVSREFHSHEFHSHEDMLVVDPKSKEEDKHLKFRISHELDSASSEVN

SEQ ID NO: 566 - protein, 300 aa, Artificial Sequence
  osteopontin__Homo_sapiens__A0A024RDE6
MRIAVICFCLLGITCAIPVKQADSGSSEEKQLYNKYPDAVATWLNPDPSQKQNLLAPQTLPSKSNESHDHMDDMDDEDDDDHVDSQDSIDSNDSDDVDDTDDSHQSDESHHSDESDELVTDFPTDLPATEVFTPVVPTVDTYDGRGDSVVYGLRSKSKKFRRPDIQYPDATDEDITSHMESEELNGAYKAIPVAQDLNAPSDWDSRGKDSYETSQLDDQSAETHSHKQSRLYKRKANDESNEHSDVIDSQELSKVSREFHSHEFHSHEDMLVVDPKSKEEDKHLKFRISHELDSASSEVN

SEQ ID NO: 567 - protein, 287 aa, Artificial Sequence
  osteopontin__Homo_sapiens__A0A024RDJ0
MRIAVICFCLLGITCAIPVKQADSGSSEEKQNAVSSEETNDFKQETLPSKSNESHDHMDDMDDEDDDDHVDSQDSIDSNDSDDVDDTDDSHQSDESHHSDESDELVTDFPTDLPATEVFTPVVPTVDTYDGRGDSVVYGLRSKSKKFRRPDIQYPDATDEDITSHMESEELNGAYKAIPVAQDLNAPSDWDSRGKDSYETSQLDDQSAETHSHKQSRLYKRKANDESNEHSDVIDSQELSKVSREFHSHEFHSHEDMLVVDPKSKEEDKHLKFRISHELDSASSEVN

SEQ ID NO: 568 - protein, 327 aa, Artificial Sequence
  osteopontin__Homo_sapiens__B7Z351
MGIVPRSLDKKAHRVQFQLNRIKAKIELPWGSLQLDCLMKTLKELYNKYPDAVATWLNPDPSQKQNLLAPQNAVSSEETNDFKQETLPSKSNESHDHMDDMDDEDDDDHVDSQDSIDSNDSDDVDDTDDSHQSDESHHSDESDELVTDFPTDLPATEVFTPVVPTVDTYDGRGDSVVYGLRSKSKKFRRPDIQYPDATDEDITSHMESEELNGAYKAIPVAQDLNAPSDWDSRGKDSYETSQLDDQSAETHSHKQSRLYKRKANDESNEHSDVIDSQELSKVSREFHSHEFHSHEDMLVVDPKSKEEDKHLKFRISHELDSASSEVN

SEQ ID NO: 569 - protein, 292 aa, Artificial Sequence
  osteopontin__Homo_sapiens__F2YQ21
MRIAVICFCLLGITCAIPVKQADSGSSEEKQLYNKYPDAVATWLNPDPSQKQNLLAPQNAVSSEETNDFKQETLPSKSNESHDHMDDMDDEDDDSHQSDESHHSDESDELVTDFPTDLPATEVFTPVVPTVDTYDGRGDSVVYGLRSKSKKFRRPDIQYPDATDEDITSHMESEELNGAYKAIPVAQDLNAPSDWDSRGKDSYETSQLDDQSAETHSHKQSRLYKRKANDESNEHSDVIDSQELSKVSREFHSHEFHSHEDMLVVDPKSKEEDKHLKFRISHELDSASSEVN

SEQ ID NO: 570 - protein, 314 aa, Artificial Sequence; identical to SEQ ID NO: 565
  osteopontin__Homo_sapiens__P10451

SEQ ID NO: 571 - protein, 393 aa, Artificial Sequence [sequence omitted]

SEQ ID NO: 572 - protein, 102 aa, Artificial Sequence
  PAGE-4__Homo_sapiens__O60829
MSARVRSRSRGRGDGQEAPDVVAFVAPGESQQEEPPTDNQDIEPGQEREGTPPIEERKVEGDCQEMDLEKTRSERGDGSDVKEKTPPNPKHAKTKEAGDGQP

SEQ ID NO: 573 - protein, 402 aa, Artificial Sequence [sequence omitted]

SEQ ID NO: 574 - protein, 415 aa, Artificial Sequence
  PAI-2__Homo_sapiens__P05120
MEDLCVANTLFALNLFKHLAKASPTQNLFLSPWSISSTMAMVYMGSRGSTEDQMAKVLQFNEVGANAVTPMTPENFTSCGFMQQIQKGSYPDAILQAQAADKIHSSFRSLSSAINASTGNYLLESVNKLFGEKSASFREEYIRLCQKYYSSEPQAVDFLECAEEARKKINSWVKTQTKGKIPNLLPEGSVDGDTRMVLVNAVYFKGKWKTPFEKKLNGLYPFRVNSAQRTPVQMMYLREKLNIGYIEDLKAQILELPYAGDVSMFLLLPDEIADVSTGLELLESEITYDKLNKWTSKDKMAEDEVEVYIPQFKLEEHYELRSILRSMGMEDAFNKGRANFSGMSERNDLFLSEVFHQAMVDVNEEGTEAAAGTGGVMTGRTGHGGPQFVADHPFLFLIMHKITNCILFFGRFSSP

SEQ ID NO: 575 - protein, 175 aa, Artificial Sequence
  PAP__Homo_sapiens__Q06141
MLPPMALPSVSWMLLSCLMLLSQVQGEEPQRELPSARIRCPKGSKAYGSHCYALFLSPKSWTDADLACQKRPSGNLVSVLSGAEGSFVSSLVKSIGNSYSYVWIGLHDPTQGTEPNGEGWEWSSSDVMNYFAWERNPSTISSPGHCASLSRSTAFLRWKDYNCNVRLPYVCKFTD

SEQ ID NO: 576 - protein, 175 aa, Artificial Sequence; identical to SEQ ID NO: 575
  PAP__Homo_sapiens__Q53S56

SEQ ID NO: 577 - protein, 126 aa, Artificial Sequence
  PATE__Homo_sapiens__Q8WXA2
MDKSLLLELPILLCCFRALSGSLSMRNDAVNEIVAVKNNFPVIEIVQCRMCHLQFPGEKCSRGRGICTATTEEACMVGRMFKRDGNPWLTFMGCLKNCADVKGIRWSVYLVNFRCCRSHDLCNEDL

SEQ ID NO: 578 - protein, 479 aa, Artificial Sequence
  PAX3__Homo_sapiens__P23760
MTTLAGAVPRMMRPGPGQNYPRSGFPLEVSTPLGQGRVNQLGGVFINGRPLPNHIRHKIVEMAHHGIRPCVISRQLRVSHGCVSKILCRYQETGSIRPGAIGGSKPKQVTTPDVEKKIEEYKRENPGMFSWEIRDKLLKDAVCDRNTVPSVSSISRILRSKFGKGEEEEADLERKEAEESEKKAKHSIDGILSERASAPQSDEGSDIDSEPDLPLKRKQRRSRTTFTAEQLEELERAFERTHYPDIYTREELAQRAKLTEARVQVWFSNRRARWRKQAGANQLMAFNHLIPGGFPPTAMPTLPTYQLSETSYQPTSIPQAVSDPSSTVHRPQPLPPSTVHQSTIPSNPDSSSAYCLPSTRHGFSSYTDSFVPPSGPSNPMNPTIGNGLSPQVMGLLTNHGGVPHQPQTDYALSPLTGGLEPTTTVSASCSQRLDHMKSLDSLPTSQSYCPPTYSTTGYSMDPVTGYQYGQYGQSKPWTF

SEQ ID NO: 579 - protein, 391 aa, Artificial Sequence
  PAX5__Homo_sapiens__Q02548
MDLEKNYPTPRTSRTGHGGVNQLGGVFVNGRPLPDVVRQRIVELAHQGVRPCDISRQLRVSHGCVSKILGRYYETGSIKPGVIGGSKPKVATPKVVEKIAEYKRQNPTMFAWEIRDRLLAERVCDNDTVPSVSSINRIIRTKVQQPPNQPVPASSHSIVSTGSVTQVSSVSTDSAGSSYSISGILGITSPSADTNKRKRDEGIQESPVPNGHSLPGRDFLRKQMRGDLFTQQQLEVLDRVFERQHYSDIFTTTEPIKPEQTTEYSAMASLAGGLDDMKANLASPTPADIGSSVPGPQSYPIVTGRDLASTTLPGYPPHVPPAGQGSYSAPTLTGMVPGSEFSGSPYSHPQYSSYNDSWRFPNPGLLGSPYYYSAAARGAAPPAAATAYDRH

SEQ ID NO: 580 - protein, 290 aa, Artificial Sequence
  PD1L1__Homo_sapiens__Q9NZQ7
MRIFAVFIFMTYWHLLNAFTVTVPKDLYVVEYGSNMTIECKFPVEKQLDLAALIVYWEMEDKNIIQFVHGEEDLKVQHSSYRQRARLLKDQLSLGNAALQITDVKLQDAGVYRCMISYGGADYKRITVKVNAPYNKINQRILVVDPVTSEHELTCQAEGYPKAEVIWTSSDHQVLSGKTTTTNSKREEKLFNVTSTLRINTTTNEIFYCTFRRLDPEENHTAELVIPELPLAHPPNERTHLVILGAILLCLGVALTFIFRLRKGRMMDVKKCGIQDTNSKKQSDTHLEET

SEQ ID NO: 581 - protein, 288 aa, Artificial Sequence
  PDCD1__Homo_sapiens__Q15116
MQIPQAPWPVVWAVLQLGWRPGWFLDSPDRPWNPPTFSPALLVVTEGDNATFTCSFSNTSESFVLNWYRMSPSNQTDKLAAFPEDRSQPGQDCRFRVTQLPNGRDFHMSVVRARRNDSGTYLCGAISLAPKAQIKESLRAELRVTERRAEVPTAHPSPSPRPAGQFQTLVVGVVGGLLGSLVLLVWVLAVICSRAARGTIGARRTGQPLKEDPSAVPVFSVDYGELDFQWREKTPEPPVPCVPEQTEYATIVFPSGMGTSSPARRGSADGPRSAQPLRPEDGHCSWPL

SEQ ID NO: 582 - protein, 335 aa, Artificial Sequence
  PDEF__Homo_sapiens__O95238
MGSASPGLSSVSPSHLLLPPDTVSRTGLEKAAAGAVGLERRDWSPSPPATPEQGLSAFYLSYFDMLYPEDSSWAAKAPGASSREEPPEEPEQCPVIDSQAPAGSLDLVPGGLTLEEHSLEQVQSMVVGEVLKDIETACKLLNITADPMDWSPSNVQKWLLWTEHQYRLPPMGKAFQELAGKELCAMSEEQFRQRSPLGGDVLHAHLDIWKSAAWMKERTSPGAIHYCASTSEESWTDSEVDSSCSGQPIHLWQFLKELLLKPHSYGRFIRWLNKEKGIFKIEDSAQVARLWGIRKNRPAMNYDKLSRSIRQYYKKGIIRKPDISQRLVYQFVHPI

SEQ ID NO: 583 - protein, 738 aa, Artificial Sequence
  PECA1__Homo_sapiens__P16284
MQPRWAQGATMWLGVLLTLLLCSSLEGQENSFTINSVDMKSLPDWTVQNGKNLTLQCFADVSTTSHVKPQHQMLFYKDDVLFYNISSMKSTESYFIPEVRIYDSGTYKCTVIVNNKEKTTAEYQLLVEGVPSPRVTLDKKEAIQGGIVRVNCSVPEEKAPIHFTIEKLELNEKMVKLKREKNSRDQNFVILEFPVEEQDRVLSFRCQARIISGIHMQTSESTKSELVTVTESFSTPKFHISPTGMIMEGAQLHIKCTIQVTHLAQEFPEIIIQKDKAIVAHNRHGNKAVYSVMAMVEHSGNYTCKVESSRISKVSSIVVNITELFSKPELESSFTHLDQGERLNLSCSIPGAPPANFTIQKEDTIVSQTQDFTKIASKSDSGTYICTAGIDKVVKKSNTVQIVVCEMLSQPRISYDAQFEVIKGQTIEVRCESISGTLPISYQLLKTSKVLENSTKNSNDPAVFKDNPTEDVEYQCVADNCHSHAKMLSEVLRVKVIAPVDEVQISILSSKVVESGEDIVLQCAVNEGSGPITYKFYREKEGKPFYQMTSNATQAFWTKQKASKEQEGEYYCTAFNRANHASSVPRSKILTVRVILAPWKKGLIAVVIIGVIIALLIIAAKCYFLRKAKAKQMPVEMSRPAVPLLNSNNEKMSDPNMEANSHYGHNDDVRNHAMKPINDNKEPLNSDVQYTEVQVSSAESHKDLGKKDTETVYSEVRKAVPDAVESRYSRTEGSLDGT

SEQ ID NO: 584 - protein, 911 aa, Artificial Sequence
  PGCB__Homo_sapiens__Q96GW7
MAQLFLPLLAALVLAQAPAALADVLEGDSSEDRAFRVRIAGDAPLQGVLGGALTIPCHVHYLRPPPSRRAVLGSPRVKWTFLSRGREAEVLVARGVRVKVNEAYRFRVALPAYPASLTDVSLALSELRPNDSGIYRCEVQHGIDDSSDAVEVKVKGVVFLYREGSARYAFSFSGAQEACARIGAHIATPEQLYAAYLGGYEQCDAGWLSDQTVRYPIQTPREACYGDMDGFPGVRNYGVVDPDDLYDVYCYAEDLNGELFLGDPPEKLTLEEARAYCQERGAEIATTGQLYAAWDGGLDHCSPGWLADGSVRYPIVTPSQRCGGGLPGVKTLFLFPNQTGFPNKHSRFNVYCFRDSAQPSAIPEASNPASNPASDGLEAIVTVTETLEELQLPQEATESESRGAIYSIPIMEDGGGGSSTPEDPAEAPRTLLEFETQSMVPPTGFSEEEGKALEEEEKYEDEEEKEEEEEEEEVEDEALWAWPSELSSPGPEASLPTEPAAQEESLSQAPARAVLQPGASPLPDGESEASRPPRVHGPPTETLPTPRERNLASPSPSTLVEAREVGEATGGPELSGVPRGESEETGSSEGAPSLLPATRAPEGTRELEAPSEDNSGRTAPAGTSVQAQPVLPTDSASRGGVAVVPASGDCVPSPCHNGGTCLEEEEGVRCLCLPGYGGDLCDVGLRFCNPGWDAFQGACYKHFSTRRSWEEAETQCRMYGAHLASISTPEEQDFINNRYREYQWIGLNDRTIEGDFLWSDGVPLLYENWNPGQPDSYFLSGENCVVMVWHDQGQWSDVPCNYHLSYTCKMGLVSCGPPPELPLAQVFGRPRLRYEVDTVLRYRCREGLAQRNLPLIRCQENGRWEAPQISCVPRRPARALHPEEDPEGRQGRLLGRWKALLIPPSSPMPGP

SEQ ID NO: 585 - protein, 1106 aa, Artificial Sequence
  PGFRB__Homo_sapiens__P09619
MRLPGAMPALALKGELLLLSLLLLLEPQISQGLVVTPPGPELVLNVSSTFVLTCSGSAPVVWERMSQEPPQEMAKAQDGTFSSVLTLTNLTGLDTGEYFCTHNDSRGLETDERKRLYIFVPDPTVGFLPNDAEELFIFLTEITEITIPCRVTDPQLVVTLHEKKGDVALPVPYDHQRGFSGIFEDRSYICKTTIGDREVDSDAYYVYRLQVSSINVSVNAVQTVVRQGENITLMCIVIGNEVVNFEWTYPRKESGRLVEPVTDFLLDMPYHIRSILHIPSAELEDSGTYTCNVTESVNDHQDEKAINITVVESGYVRLLGEVGTLQFAELHRSRTLQVVFEAYPPPTVLWFKDNRTLGDSSAGEIALSTRNVSETRYVSELTLVRVKVAEAGHYTMRAFHEDAEVQLSFQLQINVPVRVLELSESHPDSGEQTVRCRGRGMPQPNIIWSACRDLKRCPRELPPTLLGNSSEEESQLETNVTYWEEEQEFEVVSTLRLQHVDRPLSVRCTLRNAVGQDTQEVIVVPHSLPFKVVVISAILALVVLTIISLIILIMLWQKKPRYEIRWKVIESVSSDGHEYIYVDPMQLPYDSTWELPRDQLVLGRTLGSGAFGQVVEATAHGLSHSQATMKVAVKMLKSTARSSEKQALMSELKIMSHLGPHLNVVNLLGACTKGGPIYIITEYCRYGDLVDYLHRNKHTFLQHHSDKRRPPSAELYSNALPVGLPLPSHVSLTGESDGGYMDMSKDESVDYVPMLDMKGDVKYADIESSNYMAPYDNYVPSAPERTCRATLINESPVLSYMDLVGFSYQVANGMEFLASKNCVHRDLAARNVLICEGKLVKICDFGLARDIMRDSNYISKGSTFLPLKWMAPESIFNSLYTTLSDVWSFGILLWEIFTLGGTPYPELPMNEQFYNAIKRGYRMAQPAHASDEIYEIMQKCWEEKFEIRPPFSQLVLLLERLLGEGYKKKYQQVDEEFLRSDHPAILRSQARLPGFHGLRSPLDTSSVLYTAVQPNEGDNDYIIPLPDPKPEVADEGPLEGSPSLASSTLNEVNTSSTISCDSPLEPQDEPEPEPQLELQVEPEPELEQLPDSGCPAPRAEAEDSFL

SEQ ID NO: 586 - protein, 313 aa, Artificial Sequence
  Pim-1_-Kinase__Homo_sapiens__A0A024RD25
MLLSKINSLAHLRAAPCNDLHATKLAPGKEKEPLESQYQVGPLLGSGGFGSVYSGIRVSDNLPVAIKHVEKDRISDWGELPNGTRVPMEVVLLKKVSSGFSGVIRLLDWFERPDSFVLILERPEPVQDLFDFITERGALQEELARSFFWQVLEAVRHCHNCGVLHRDIKDENILIDLNRGELKLIDFGSGALLKDTVYTDFDGTRVYSPPEWIRYHRYHGRSAAVWSLGILLYDMVCGDIPFEHDEEIIRGQVFFRQRVSSECQHLIRWCLALRPSDRPTFEEIQNHPWMQDVLLPQETAEIHLHSLSPGPSK

SEQ ID NO: 587 - protein, 100 aa, Artificial Sequence
  Pin-1__Homo_sapiens__O15428
MADEEKLPPGWEKRMSRPSGRGYYFNHITNPSQWERPSGNSSSGGKIWQGEPARVRRSHLLVKPVKAALDLAAGNHPDQGGGPGADQRLHPEDQGRREGL

SEQ ID NO: 588 - protein, 163 aa, Artificial Sequence
  Pin-1__Homo_sapiens__Q13526
MADEEKLPPGWEKRMSRSSGRVYYFNHITNASQWERPSGNSSSGGKNGQGEPARVRCSHLLVKHSQSRRPSSWRQEKITRTKEEALELINGYIQKIKSGEEDFESLASQFSDCSSAKARGDLGAFSRGQMQKPFEDASFALRTGEMSGPVFTDSGIHIILRTE

SEQ ID NO: 589 - protein, 45 aa, Artificial Sequence
  Pin-1__Homo_sapiens__Q49AR7
MQKPFEDASFALRTGEMSGPVFTDSGIHIILRTECWRQTRGPNCF

SEQ ID NO: 590 - protein, 212 aa, Artificial Sequence
  PLAC1__Homo_sapiens__Q9HBJ0
MKVFKFIGLMILLTSAFSAGSGQSPMTVLCSIDWFMVTVHPFMLNNDVCVHFHELHLGLGCPPNHVQPHAYQFTYRVTECGIRAKAVSQDMVIYSTEIHYSSKGTPSKFVIPVSCAAPQKSPWLTKPCSMRVASKSRATAQKDEKCYEVFSLSQSSQRPNCDCPPCVFSEEEHTQVPCHQAGAQEAQPLQPSHFLDISEDWSLHTDDMIGSM

SEQ ID NO: 591 - protein, 661 aa, Artificial Sequence
  PMEL__Homo_sapiens__P40967
MDLVLKRCLLHLAVIGALLAVGATKVPRNQDWLGVSRQLRTKAWNRQLYPEWTEAQRLDCWRGGQVSLKVSNDGPTLIGANASFSIALNFPGSQKVLPDGQVIWVNNTIINGSQVWGGQPVYPQETDDACIFPDGGPCPSGSWSQKRSFVYVWKTWGQYWQVLGGPVSGLSIGTGRAMLGTHTMEVTVYHRRGSRSYVPLAHSSSAFTITDQVPFSVSVSQLRALDGGNKHFLRNQPLTFALQLHDPSGYLAEADLSYTWDFGDSSGTLISRALVVTHTYLEPGPVTAQVVLQAAIPLTSCGSSPVPGTTDGHRPTAEAPNTTAGQVPTTEVVGTTPGQAPTAEPSGTTSVQVPTTEVISTAPVQMPTAESTGMTPEKVPVSEVMGTTLAEMSTPEATGMTPAEVSIVVLSGTTAAQVTTTEWVETTARELPIPEPEGPDASSIMSTESITGSLGPLLDGTATLRLVKRQVPLDCVLYRYGSFSVTLDIVQGIESAEILQAVPSGEGDAFELTVSCQGGLPKEACMEISSPGCQPPAQRLCQPVLPSPACQLVLHQILKGGSGTYCLNVSLADTNSLAVVSTQLIMPGQEAGLGQVPLIVGILLVLMAVVLASLIYRRRLMKQDFSVPQLPHSSSHWLRLPRIFCSCPIGENSPLLSGQQV

SEQ ID NO: 592 - protein, 882 aa, Artificial Sequence
  PML__Homo_sapiens__P29590
MEPAPARSPRPQQDPARPQEPTMPPPETPSEGRQPSPSPSPTERAPASEEEFQFLRCQQCQAEAKCPKLLPCLHTLCSGCLEASGMQCPICQAPWPLGADTPALDNVFFESLQRRLSVYRQIVDAQAVCTRCKESADFWCFECEQLLCAKCFEAHQWFLKHEARPLAELRNQSVREFLDGTRKTNNIFCSNPNHRTPTLTSIYCRGCSKPLCCSCALLDSSHSELKCDISAEIQQRQEELDAMTQALQEQDSAFGAVHAQMHAAVGQLGRARAETEELIRERVRQVVAHVRAQERELLEAVDARYQRDYEEMASRLGRLDAVLQRIRTGSALVQRMKCYASDQEVLDMHGFLRQALCRLRQEEPQSLQAAVRTDGFDEFKVRLQDLSSCITQGKDAAVSKKASPEAASTPRDPIDVDLPEEAERVKAQVQALGLAEAQPMAVVQSVPGAHPVPVYAFSIKGPSYGEDVSNTTTAQKRKCSQTQCPRKVIKMESEEGKEARLARSSPEQPRPSTSKAVSPPHLDGPPSPRSPVIGSEVFLPNSNHVASGAGEAEERVVVISSSEDSDAENSSSRELDDSSSESSDLQLEGPSTLRVLDENLADPQAEDRPLVFFDLKIDNETQKISQLAAVNRESKFRVVIQPEAFFSIYSKAVSLEVGLQHFLSFLSSMRRPILACYKLWGPGLPNFFRALEDINRLWEFQEAISGFLAALPLIRERVPGASSFKLKNLAQTYLARNMSERSAMAAVLAMRDLCRLLEVSPGPQLAQHVYPFSSLQCFASLQPLVQAAVLPRAEARLLALHNVSFMELLSAHRRDRQGGLKKYSRYLSLQTTTLPPAQPAFNLQALGTYFEGLLEGPALARAEGVSTPLAGRGLAERASQQS

SEQ ID NO: 593 - protein, 1075 aa, Artificial Sequence
  POTEF__Homo_sapiens__A5A3E0
MVVEVDSMPAASSVKKPFGLRSKMGKWCCRCFPCCRESGKSNVGTSGDHDDSAMKTLRSKMGKWCRHCFPCCRGSGKSNVGASGDHDDSAMKTLRNKMGKWCCHCFPCCRGSSKSKVGAWGDYDDSAFMEPRYHVRGEDLDKLHRAAWWGKVPRKDLIVMLRDTDVNKQDKQKRTALHLASANGNSEVVKLLLDRRCQLNVLDNKKRTALIKAVQCQEDECALMLLEHGTDPNIPDEYGNTTLHYAIYNEDKLMAKALLLYGADIESKNKHGLTPLLLGVHEQKQQVVKFLIKKKANLNALDRYGRTALILAVCCGSASIVSLLLEQNIDVSSQDLSGQTAREYAVSSHHHVICQLLSDYKEKQMLKISSENSNPEQDLKLTSEEESQRFKGSENSQPEKMSQEPEINKDGDREVEEEMKKHESNNVGLLENLTNGVTAGNGDNGLIPQRKSRTPENQQFPDNESEEYHRICELLSDYKEKQMPKYSSENSNPEQDLKLTSEEESQRLKGSENGQPEKRSQEPEINKDGDRELENFMAIEEMKKHRSTHVGFPENLTNGATAGNGDDGLIPPRKSRTPESQQFPDTENEEYHSDEQNDTQKQFCEEQNTGILHDEILIHEEKQIEVVEKMNSELSLSCKKEKDILHENSTLREEIAMLRLELDTMKHQSQLREKKYLEDIESVKKRNDNLLKALQLNELTMDDDTAVLVIDNGSGMCKAGFAGDDAPRAVFPSIVGRPRQQGMMGGMHQKESYVGKEAQSKRGILTLKYPMEHGIITNWDDMEKIWHHTFYNELRVAPEEHPVLLTEATLNPKANREKMTQIMFETFNTPAMYVAIQAVLSLYTSGRTTGIVMDSGDGVTHTVPIYEGNALPHATLRLDLAGRELPDYLMKILTEHGYRFTTMAEREIVRDIKEKLCYVALDFEQEMATVASSSSLEKSYELPDGQVITIGNERFRCPEALFQPCFLGMESCGIHETTFNSIMKSDVDIRKDLYTNTVLSGGTTMYPGMAHRMQKEIAALAPSMMKIRIIAPPKRKYSVWVGGSILASLSTFQQMWISKQEYDESGPSIVHRKCL

SEQ ID NO: 594 - protein, 584 aa, Artificial Sequence
  POTE__Homo_sapiens__Q86YR6
MVAEVCSMPTASTVKKPFDLRSKMGKWCHHRFPCCRGSGKSNMGTSGDHDDSFMKMLRSKMGKCCRHCFPCCRGSGTSNVGTSGDHENSFMKMLRSKMGKWCCHCFPCCRGSGKSNVGAWGDYDHSAFMEPRYHIRREDLDKLHRAAWWGKVPRKDLIVMLRDTDMNKRDKEKRTALHLASANGNSEVVQLLLDRRCQLNVLDNKKRTALIKAIQCQEDECVLMLLEHGADRNIPDEYGNTALHYAIYNEDKLMAKALLLYGADIESKNKCGLTPLLLGVHEQKQQVVKFLIKKKANLNVLDRYGRTALILAVCCGSASIVNLLLEQNVDVSSQDLSGQTAREYAVSSHHHVICELLSDYKEKQMLKISSENSNPEQDLKLTSEEESQRLKVSENSQPEKMSQEPEINKDCDREVEEEIKKHGSNPVGLPENLTNGASAGNGDDGLIPQRRSRKPENQQFPDTENEEYHSDEQNDTRKQLSEEQNTGISQDEILTNKQKQIEVAEQKMNSELSLSHKKEEDLLRENSVLQEEIAMLRLELDETKHQNQLRENKILEEIESVKEKTDKLLRAMQLNEEALTKTNI

SEQ ID NO: 595 - protein, 509 aa, Artificial Sequence; identical to SEQ ID NO: 190
  PRAME__Homo_sapiens__A0A024R1E6

SEQ ID NO: 596 - protein, 509 aa, Artificial Sequence; identical to SEQ ID NO: 190
  PRAME__Homo_sapiens__P78395

SEQ ID NO: 597 - protein, 214 aa, Artificial Sequence
  PRDX5/m__Homo_sapiens__P30044
MGLAGVCALRRSAGYILVGGAGGQSAAAAARRYSEGEWASGGVRSFSRAAAAMAPIKVGDAIPAVEVFEGEPGNKVNLAELFKGKKGVLFGVPGAFTPGCSKTHLPGFVEQAEALKAKGVQVVACLSVNDAFVTGEWGRAHKAEGKVRLLADPTGAFGKETDLLLDDSLVSIFGNRRLKRFSMVVQDGIVKALNVEPDGTGLTCSLAPNIISQL

SEQ ID NO: 598 - protein, 102 aa, Artificial Sequence
  PRM2__Homo_sapiens__P04554
MVRYRVRSLSERSHEVYRQQLHGQEQGHHGQEEQGLSPEHVEVYERTHGQSHYRRRHCSRRRLHRIHRRQHRSCRRRKRRSCRHRRRHRRGCRTRKRTCRRH

SEQ ID NO: 599 - protein, 553 aa, Artificial Sequence
  prostein__Homo_sapiens__Q96JT2
MVQRLWVSRLLRHRKAQLLLVNLLTFGLEVCLAAGITYVPPLLLEVGVEEKFMTMVLGIGPVLGLVCVPLLGSASDHWRGRYGRRRPFIWALSLGILLSLFLIPRAGWLAGLLCPDPRPLELALLILGVGLLDFCGQVCFTPLEALLSDLFRDPDHCRQAYSVYAFMISLGGCLGYLLPAIDWDTSALAPYLGTQEECLFGLLTLIFLTCVAATLLVAEEAALGPTEPAEGLSAPSLSPHCCPCRARLAFRNLGALLPRLHQLCCRMPRTLRRLFVAELCSWMALMTFTLFYTDFVGEGLYQGVPRAEPGTEARRHYDEGVRMGSLGLFLQCAISLVFSLVMDRLVQRFGTRAVYLASVAAFPVAAGATCLSHSVAVVTASAALTGFTFSALQILPYTLASLYHREKQVFLPKYRGDTGGASSEDSLMTSFLPGPKPGAPFPNGHVGAGGSGLLPPPPALCGASACDVSVRVVVGEPTEARVVPGRGICLDLAILDSAFLLSQVAPSLFMGSIVQLSQSVTAYMVSAAGLGLVAIYFATQVVFDKSDLAKYSA

SEQ ID NO: 600 - protein, 215 aa, Artificial Sequence [sequence omitted]

SEQ ID NO: 601 - protein, 256 aa, Artificial Sequence
  proteinase-3__Homo_sapiens__P24158
MAHRPPSPALASVLLALLLSGAARAAEIVGGHEAQPHSRPYMASLQMRGNPGSHFCGGTLIHPSFVLTAAHCLRDIPQRLVNVVLGAHNVRTQEPTQQHFSVAQVFLNNYDAENKLNDVLLIQLSSPANLSASVATVQLPQQDQPVPHGTQCLAMGWGRVGAHDPPAQVLQELNVTVVTFFCRPHNICTFVPRRKAGICFGDSGGPLICDGIIQGIDSFVIWGCATRLFPDFFTRVALYVDWIRSTLRRVEAKGRP

SEQ ID NO: 602 - protein, 919 aa, Artificial Sequence
  PSA__Homo_sapiens__P55786
MWLAAAAPSLARRLLFLGPPPPPLLLLVFSRSSRRRLHSLGLAAMPEKRPFERLPADVSPINYSLCLKPDLLDFTFEGKLEAAAQVRQATNQIVMNCADIDIITASYAPEGDEEIHATGFNYQNEDEKVTLSFPSTLQTGTGTLKIDFVGELNDKMKGFYRSKYTTPSGEVRYAAVTQFEATDARRAFPCWDEPAIKATFDISLVVPKDRVALSNMNVIDRKPYPDDENLVEVKFARTPVMSTYLVAFVVGEYDFVETRSKDGVCVRVYTPVGKAEQGKFALEVAAKTLPFYKDYFNVPYPLPKIDLIAIADFAAGAMENWGLVTYRETALLIDPKNSCSSSRQWVALVVGHELAHQWFGNLVTMEWWTHLWLNEGFASWIEYLCVDHCFPEYDIWTQFVSADYTRAQELDALDNSHPIEVSVGHPSEVDEIFDAISYSKGASVIRMLHDYIGDKDFKKGMNMYLTKFQQKNAATEDLWESLENASGKPIAAVMNTWTKQMGFPLIYVEAEQVEDDRLLRLSQKKFCAGGSYVGEDCPQWMVPITISTSEDPNQAKLKILMDKPEMNVVLKNVKPDQWVKLNLGTVGFYRTQYSSAMLESLLPGIRDLSLPPVDRLGLQNDLFSLARAGIISTVEVLKVMEAFVNEPNYTVWSDLSCNLGILSTLLSHTDFYEEIQEFVKDVFSPIGERLGWDPKPGEGHLDALLRGLVLGKLGKAGHKATLEEARRRFKDHVEGKQILSADLRSPVYLTVLKHGDGTTLDIMLKLHKQADMQEEKNRIERVLGATLLPDLIQKVLTFALSEEVRPQDTVSVIGGVAGGSKHGRKAAWKFIKDNWEELYNRYQGGFLISRLIKLSVEGFAVDKMAGEVKAFFESHPAPSAERTIQQCCENILLNAAWLKRDAESIHQYLLQRKASPPTV

SEQ ID NO: 603 - protein, 219 aa, Artificial Sequence
  PSB9__Homo_sapiens__P28065
MLRAGAPTGDLPRAGEVHTGTTIMAVEFDGGVVMGSDSRVSAGEAVVNRVFDKLSPLHERIYCALSGSAADAQAVADMAAYQLELHGIELEEPPLVLAAANVVRNISYKYREDLSAHLMVAGWDQREGGQVYGTLGGMLTRQPFAIGGSGSTFIYGYVDAAYKPGMSPEECRRFTTDAIALAMSRDGSSGGVIYLVTITAAGVDHRVILGNELPKFYDE

SEQ ID NO: 604 - protein, 114 aa, Artificial Sequence
  PSCA__Homo_sapiens__D3DWI6
MAGLALQPGTALLCYSCKAQVSNEDCLQVENCTQLGEQCWTARIRAVGLLTVISKGCSLNCVDDSQDYYVGKKNITCCDTDLCNASGAHALQPAAAILALLPALGLLLWGPGQL

SEQ ID NO: 605 - protein, 123 aa, Artificial Sequence
  PSCA__Homo_sapiens__O43653
MKAVLLALLMAGLALQPGTALLCYSCKAQVSNEDCLQVENCTQLGEQCWTARIRAVGLLTVISKGCSLNCVDDSQDYYVGKKNITCCDTDLCNASGAHALQPAAAILALLPALGLLLWGPGQL

SEQ ID NO: 606 - protein, 320 aa, Artificial Sequence
  PSGR__Homo_sapiens__Q9H255
MSSCNFTHATFVLIGIPGLEKAHFWVGFPLLSMYVVAMFGNCIVVFIVRTERSLHAPMYLFLCMLAAIDLALSTSTMPKILALFWFDSREISFEACLTQMFFIHALSAIESTILLAMAFDRYVAICHPLRHAAVLNNTVTAQIGIVAVVRGSLFFFPLPLLIKRLAFCHSNVLSHSYCVHQDVMKLAYADTLPNVVYGLTAILLVMGVDVMFISLSYFLIIRTVLQLPSKSERAKAFGTCVSHIGVVLAFYVPLIGLSVVHRFGNSLHPIVRVVMGDIYLLLPPVINPIIYGAKTKQIRTRVLAMFKISCDKDLQAVGGK

SEQ ID NO: 607 - protein, 750 aa, Artificial Sequence
  PSM__Homo_sapiens__Q04609
MWNLLHETDSAVATARRPRWLCAGALVLAGGFFLLGFLFGWFIKSSNEATNITPKHNMKAFLDELKAENIKKFLYNFTQIPHLAGTEQNFQLAKQIQSQWKEFGLDSVELAHYDVLLSYPNKTHPNYISIINEDGNEIFNTSLFEPPPPGYENVSDIVPPFSAFSPQGMPEGDLVYVNYARTEDFFKLERDMKINCSGKIVIARYGKVFRGNKVKNAQLAGAKGVILYSDPADYFAPGVKSYPDGWNLPGGGVQRGNILNLNGAGDPLTPGYPANEYAYRRGIAEAVGLPSIPVHPIGYYDAQKLLEKMGGSAPPDSSWRGSLKVPYNVGPGFTGNFSTQKVKMHIHSTNEVTRIYNVIGTLRGAVEPDRYVILGGHRDSWVFGGIDPQSGAAVVHEIVRSFGTLKKEGWRPRRTILFASWDAEEFGLLGSTEWAEENSRLLQERGVAYINADSSIEGNYTLRVDCTPLMYSLVHNLTKELKSPDEGFEGKSLYESWTKKSPSPEFSGMPRISKLGSGNDFEVFFQRLGIASGRARYTKNWETNKFSGYPLYHSVYETYELVEKFYDPMFKYHLTVAQVRGGMVFELANSIVLPFDCRDYAVVLRKYADKIYSISMKHPQEMKTYSVSFDSLFSAVKNFTEIASKFSERLQDFDKSNPIVLRMMNDQLMFLERAFIDPLGLPDRPFYRHVIYAPSSHNKYAGESFPGIYDALFDIESKVDPSKAWGEVKRQIYVAAFTVQAAAETLSEVA

SEQ ID NO: 608 - protein, 1306 aa, Artificial Sequence
  PTPRC__Homo_sapiens__NP_002829
MTMYLWLKLLAFGFAFLDTEVFVTGQSPTPSPTGLTTAKMPSVPLSSDPLPTHTTAFSPASTFERENDFSETTTSLSPDNTSTQVSPDSLDNASAFNTTGVSSVQTPHLPTHADSQTPSAGTDTQTFSGSAANAKLNPTPGSNAISDVPGERSTASTFPTDPVSPLTTTLSLAHHSSAALPARTSNTTITANTSDAYLNASETTTLSPSGSAVISTTTIATTPSKPTCDEKYANITVDYLYNKETKLFTAKLNVNENVECGNNTCTNNEVHNLTECKNASVSISHNSCTAPDKTLILDVPPGVEKFQLHDCTQVEKADTTICLKWKNIETFTCDTQNITYRFQCGNMIFDNKEIKLENLEPEHEYKCDSEILYNNHKFTNASKIIKTDFGSPGEPQIIFCRSEAAHQGVITWNPPQRSFHNFTLCYIKETEKDCLNLDKNLIKYDLQNLKPYTKYVLSLHAYIIAKVQRNGSAAMCHFTTKSAPPSQVWNMTVSMTSDNSMHVKCRPPRDRNGPHERYHLEVEAGNTLVRNESHKNCDFRVKDLQYSTDYTFKAYFHNGDYPGEPFILHHSTSYNSKALIAFLAFLIIVTSIALLVVLYKIYDLHKKRSCNLDEQQELVERDDEKQLMNVEPIHADILLETYKRKIADEGRLFLAEFQSIPRVFSKFPIKEARKPFNQNKNRYVDILPYDYNRVELSEINGDAGSNYINASYIDGFKEPRKYIAAQGPRDETVDDFWRMIWEQKATVIVMVTRCEEGNRNKCAEYWPSMEEGTRAFGDVVVKINQHKRCPDYIIQKLNIVNKKEKATGREVTHIQFTSWPDHGVPEDPHLLLKLRRRVNAFSNFFSGPIVVHCSAGVGRTGTYIGIDAMLEGLEAENKVDVYGYVVKLRRQRCLMVQVEAQYILIHQALVEYNQFGETEVNLSELHPYLHNMKKRDPPSEPSPLEAEFQRLPSYRSWRTQHIGNQEENKSKNRNSNVIPYDYNRVPLKHELEMSKESEHDSDESSDDDSDSEEPSKYINASFIMSYWKPEVMIAAQGPLKETIGDFWQMIFQRKVKVIVMLTELKHGDQEICAQYWGEGKQTYGDIEVDLKDTDKSSTYTLRVFELRHSKRKDSRTVYQYQYTNWSVEQLPAEPKELISMIQVVKQKLPQKNSSEGNKHHKSTPLLIHCRDGSQQTGIFCALLNLLESAETEEVVDIFQVVKALRKARPGMVSTFEQYQFLYDVIASTYPAQNGQVKKNNHQEDKIEFDNEVDKVKQDANCVNPLGAPEKLPEAKEQAEGSEPTSGTEGPEHSVNGPASPALNQGS

SEQ ID NO: 609 - protein, 207 aa, Artificial Sequence
  RAB8A__Homo_sapiens__P61006
MAKTYDYLFKLLLIGDSGVGKTCVLFRFSEDAFNSTFISTIGIDFKIRTIELDGKRIKLQIWDTAGQERFRTITTAYYRGAMGIMLVYDITNEKSFDNIRNWIRNIEEHASADVEKMILGNKCDVNDKRQVSKERGEKLALDYGIKFMETSAKANINVENAFFTLARDIKAKMDKKLEGNSPQGSNQGVKITPDQQKRSSFFRCVLL

SEQ ID NO: 610 - protein, 419 aa, Artificial Sequence
  RAGE-1__Homo_sapiens__Q9UQ07
MKNYKAIGKIGEGTFSEVMKMQSLRDGNYYACKQMKQRFESIEQVNNLREIQALRRLNPHPNILMLHEVVFDRKSGSLALICELMDMNIYELIRGRRYPLSEKKIMHYMYQLCKSLDHIHRNGIFHRDVKPENILIKQDVLKLGDFGSCRSVYSKQPYTEYISTRWYRAPECLLTDGFYTYKMDLWSAGCVFYEIASLQPLFPGVNELDQISKIHDVIGTPAQKILTKFKQSRAMNFDFPFKKGSGIPLLTTNLSPQCLSLLHAMVAYDPDERIAAHQALQHPYFQEQRKTEKRALGSHRKAGFPEHPVAPEPLSNSCQISKEGRKQKQSLKQEEDRPKRRGPAYVMELPKLKLSGVVRLSSYSSPTLQSVLGSGTNGRVPVLRPLKCIPASKKTDPQKDLKPAPQQCRLPTIVRKGGR

SEQ ID NO: 611 - protein, 462 aa, Artificial Sequence
  RARA__Homo_sapiens__P10276
MASNSSSCPTPGGGHLNGYPVPPYAFFFPPMLGGLSPPGALTTLQHQLPVSGYSTPSPATIETQSSSSEEIVPSPPSPPPLPRIYKPCFVCQDKSSGYHYGVSACEGCKGFFRRSIQKNMVYTCHRDKNCIINKVTRNRCQYCRLQKCFEVGMSKESVRNDRNKKKKEVPKPECSESYTLTPEVGELIEKVRKAHQETFPALCQLGKYTTNNSSEQRVSLDIDLWDKFSELSTKCIIKTVEFAKQLPGFTTLTIADQITLLKAACLDILILRICTRYTPEQDTMTFSDGLTLNRTQMHNAGFGPLTDLVFAFANQLLPLEMDDAETGLLSAICLICGDRQDLEQPDRVDMLQEPLLEALKVYVRKRRPSRPHMFPKMLMKITDLRSISAKGAERVITLKMEIPGSMPPLIQEMLENSEGLDTLSGQPGGGGRDGGGLAPPPGSCSPSLSPSSNRSSPATHSP

SEQ ID NO: 612 - protein, 189 aa, Artificial Sequence
  RASH__Homo_sapiens__P01112
MTEYKLVVVGAGGVGKSALTIQLIQNHFVDEYDPTIEDSYRKQVVIDGETCLLDILDTAGQEEYSAMRDQYMRTGEGFLCVFAINNTKSFEDIHQYREQIKRVKDSDDVPMVLVGNKCDLAARTVESRQAQDLARSYGIPYIETSAKTRQGVEDAFYTLVREIRQHKLRKLNPPDESGPGCMSCKCVLS

SEQ ID NO: 613 - protein, 189 aa, Artificial Sequence [sequence omitted]

SEQ ID NO: 614 - protein, 189 aa, Artificial Sequence
  RASN__Homo_sapiens__P01111
MTEYKLVVVGAGGVGKSALTIQLIQNHFVDEYDPTIEDSYRKQVVIDGETCLLDILDTAGQEEYSAMRDQYMRTGEGFLCVFAINNSKSFADINLYREQIKRVKDSDDVPMVLVGNKCDLPTRTVDTKQAHELAKSYGIPFIETSAKTRQGVEDAFYTLVREIRQYRMKKLNSSDDGTQGCMGLPCVVM

SEQ ID NO: 615 - protein, 181 aa, Artificial Sequence
  RGS5__Homo_sapiens__O15539
MCKGLAALPHSCLERAKEIKIKLGILLQKPDSVGDLVIPYNEKPEKPAKTQKTSLDEALQWRDSLDKLLQNNYGLASFKSFLKSEFSEENLEFWIACEDYKKIKSPAKMAEKAKQIYEEFIQTEAPKEVNIDHFTKDITMKNLVEPSLSSFDMAQKRIHALMEKDSLPRFVRSEFYQELIK

SEQ ID NO: 616 - protein, 724 aa, Artificial Sequence
  RHAMM/CD168__Homo_sapiens__O75330
MSFPKAPLKRFNDPSGCAPSPGAYDVKTLEVLKGPVSFQKSQRFKQQKESKQNLNVDKDTTLPASARKVKSSESKESQKNDKDLKILEKEIRVLLQERGAQDRRIQDLETELEKMEARLNAALREKTSLSANNATLEKQLIELTRTNELLKSKFSENGNQKNLRILSLELMKLRNKRETKMRGMMAKQEGMEMKLQVTQRSLEESQGKIAQLEGKLVSIEKEKIDEKSETEKLLEYIEEISCASDQVEKYKLDIAQLEENLKEKNDEILSLKQSLEENIVILSKQVEDLNVKCQLLEKEKEDHVNRNREHNENLNAEMQNLKQKFILEQQEREKLQQKELQIDSLLQQEKELSSSLHQKLCSFQEEMVKEKNLFEEELKQTLDELDKLQQKEEQAERLVKQLEEEAKSRAEELKLLEEKLKGKEAELEKSSAAHTQATLLLQEKYDSMVQSLEDVTAQFESYKALTASEIEDLKLENSSLQEKAAKAGKNAEDVQHQILATESSNQEYVRMLLDLQTKSALKETEIKEITVSFLQKITDLQNQLKQQEEDFRKQLEDEEGRKAEKENTTAELTEEINKWRLLYEELYNKTKPFQLQLDAFEVEKQALLNEHGAAQEQLNKIRDSYAKLLGHQNLKQKIKHVVKLKDENSQLKSEVSKLRCQLAKKKQSETKLQEELNKVLGIKHFDPSKAFHHESKENFALKTPLKEGNTNCYRAPMECQESWK

SEQ ID NO: 617 - protein, 193 aa, Artificial Sequence
  RHOC__Homo_sapiens__P08134
MAAIRKKLVIVGDGACGKTCLLIVFSKDQFPEVYVPTVFENYIADIEVDGKQVELALWDTAGQEDYDRLRPLSYPDTDVILMCFSIDSPDSLENIPEKWTPEVKHFCPNVPIILVGNKKDLRQDEHTRRELAKMKQEPVRSEEGRDMANRISAFGYLECSAKTKEGVREVFEMATRAGLQVRKNKRRRGCPIL

SEQ ID NO: 618 - protein, 295 aa, Artificial Sequence [sequence omitted]

SEQ ID NO: 619 - protein, 866 aa, Artificial Sequence
  RU1__Homo_sapiens__Q9UHJ3
MNGEQQLDADAGSGMEEVELSWEDYLEETGSTAVPYGSFKHVDTRLQNGFAPGMKLEVAVRTDPETYWVATVITTCEQLLLLRYDGYGEDRRADFWCDIRKADLYPIGWCEQNKKTLEAPEGIRDKVSDWDEFLRQTLIGACSPPVPLLEGLRNGRNPLDLIAPGSRLECQAFQDSLSTWIVTVVENIGGRLKLRYEGLESSDNYEHWLYYLDPFLHHVGWAAQQGYELQPPSAIRHLKNEAEWQEILAKVKEEEEEPLPSYLFKDKQVIGIHTFSVNMKLEAVDPWSPFGISPATVVKVFDEKYFLVEMDDLRPENHARRSFVCHADSPGIFPVQWSLKNGLHISPPPGYPSQDFDWADYLKQCGAEAAPQRCFPPLISEHEFKENMKLEAVNPILPEEVCVATITAVRGSYLWLQLEGSKKPIPECIVSVESMDIFPLGWCETNGHPLSTPRRARVYKQRKIAVVQPEKQVPSSRTVHEGLRNQELNSTESVMINGKYCCPKIYFNHRCFSGPYLNKGRIAELPQCVGPGNCVLVLREVLTLLINAAYKPSRVLRELQLDKDSVWHGCGEVLKAKYKGKSYRATVEIVKTADRVTEFCRQTCIKLECCPNLFGPRMVLDKCSENCSVLTKTKYTHYYGKKKNKRIGRPPGGHSNLACALKKASKRRKRRKNVFVHKKKRSSASVDNTPAGSPQGSGGEDEDDPDEGDDDSLSEGSTSEQQDELQEESEMSEKKSCSSSPTQSEISTSLPPDRQRRKRELRTFSFSDDENKPPSPKEIRIEVAERLHLDSNPLKWSVADVVRFIRSTDCAPLARIFLDQEIDGQALLLLTLPTVQECMDLKLGPAIKLCHHIERIKFAFYEQFAN

SEQ ID NO: 620 - protein, 476 aa, Artificial Sequence
  RU2__Homo_sapiens__Q9UHG0
MSGSSARSSHLSQPVVKSVLVYRNGDPFYAGRRVVIHEKKVSSFEVFLKEVTGGVQAPFGAVRNIYTPRTGHRIRKLDQIQSGGNYVAGGQEAFKKLNYLDIGEIKKRPMEVVNTEVKPVIHSRINVSARFRKPLQEPCTIFLIANGDLINPASRLLIPRKTLNQWDHVLQMVTEKITLRSGAVHRLYTLEGKLVESGAELENGQFYVAVGRDKFKKLPYSELLFDKSTMRRPFGQKASSLPPIVGSRKSKGSGNDRHSKSTVGSSDNSSPQPLKRKGKKEDVNSEKLTKLKQNVKLKNSQETIPNSDEGIFKAGAERSETRGAAEVQEDEDTQVEVPVDQRPAEIVDEEEDGEKANKDAEQKEDFSGMNGDLEEEGGREATDAPEQVEEILDHSEQQARPARVNGGTDEENGEELQQVNNELQLVLDKERKSQGAGSGQDEADVDPQRPPRPEVKITSPEENENNQQNKDYAAVA

SEQ ID NO: 621 - protein, 453 aa, Artificial Sequence
  RUNX1__Homo_sapiens__Q01196
MRIPVDASTSRRFTPPSTALSPGKMSEALPLGAPDAGAALAGKLRSGDRSMVEVLADHPGELVRTDSPNFLCSVLPTHWRCNKTLPIAFKVVALGDVPDGTLVTVMAGNDENYSAELRNATAAMKNQVARFNDLRFVGRSGRGKSFTLTITVFTNPPQVATYHRAIKITVDGPREPRRHRQKLDDQTKPGSLSFSERLSELEQLRRTAMRVSPHHPAPTPNPRASLNHSTAFNPQPQSQMQDTRQIQPSPPWSYDQSYQYLGSIASPSVHPATPISPGRASGMTTLSAELSSRLSTAPDLTAFSDPRQFPALPSISDPRMHYPGAFTYSPTPVTSGIGIGMSAMGSATRYHTYLPPPYPGSSQAQGGPFQASSPSYHLYYGASAGSYQFSMVGGERSPPRILPPCTNASTGSALLNPSLPNQSDVVEAEGSHSNSPTNMAPSARLEEAVWRPY

SEQ ID NO: 622 - protein, 359 aa, Artificial Sequence [sequence omitted]

SEQ ID NO: 623 - protein, 904 aa, Artificial Sequence
  SAGE__Homo_sapiens__Q9NXZ1
MQASPLQTSQPTPPEELHAAAYVFTNDGQQMRSDEVNLVATGHQSKKKHSRKSKRHSSSKRRKSMSSWLDKQEDAAVTHSICEERINNGQPVADNVLSTAPPWPDATIAHNIREERMENGQSRTDKVLSTAPPQLVHMAAAGIPSMSTRDLHSTVTHNIREERMENGQPQPDNVLSTGPTGLINMAATPIPAMSARDLYATVTHNVCEQKMENVQPAPDNVLLTLRPRRINMTDTGISPMSTRDPYATITYNVPEEKMEKGQPQPDNILSTASTGLINVAGAGTPAISTNGLYSTVPHNVCEEKMENDQPQPNNVLSTVQPVIIYLTATGIPGMNTRDQYATITHNVCEERVVNNQPLPSNALSTVLPGLAYLATADMPAMSTRDQHATIIHNLREEKKDNSQPTPDNVLSAVTPELINLAGAGIPPMSTRDQYATVNHHVHEARMENGQRKQDNVLSNVLSGLINMAGASIPAMSSRDLYATITHSVREEKMESGKPQTDKVISNDAPQLGHMAAGGIPSMSTKDLYATVTQNVHEERMENNQPQPSYDLSTVLPGLTYLTVAGIPAMSTRDQYATVTHNVHEEKIKNGQAASDNVFSTVPPAFINMAATGVSSMSTRDQYAAVTHNIREEKINNSQPAPGNILSTAPPWLRHMAAAGISSTITRDLYVTATHSVHEEKMTNGQQAPDNSLSTVPPGCINLSGAGISCRSTRDLYATVIHDIQEEEMENDQTPPDGFLSNSDSPELINMTGHCMPPNALDSFSHDFTSLSKDELLYKPDSNEFAVGTKNYSVSAGDPPVTVMSLVETVPNTPQISPAMAKKINDDIKYQLMKEVRRFGQNYERIFILLEEVQGSMKVKRQFVEFTIKEAARFKKVVLIQQLEKALKEIDSHCHLRKVKHMRKR

SEQ ID NO: 624 - protein, 800 aa, Artificial Sequence
  SART-_1__Homo_sapiens__O43290
MGSSKKHRGEKEAAGTTAAAGTGGATEQPPRHREHKKHKHRSGGSGGSGGERRKRSRERGGERGSGRRGAEAEARSSTHGRERSQAEPSERRVKREKRDDGYEAAASSKTSSGDASSLSIEETNKLRAKLGLKPLEVNAIKKEAGTKEEPVTADVINPMALRQREELREKLAAAKEKRLLNQKLGKIKTLGEDDPWLDDTAAWIERSRQLQKEKDLAEKRAKLLEEMDQEFGVSTLVEEEFGQRRQDLYSARDLQGLTVEHAIDSFREGETMILTLKDKGVLQEEEDVLVNVNLVDKERAEKNVELRKKKPDYLPYAEDESVDDLAQQKPRSILSKYDEELEGERPHSFRLEQGGTADGLRERELEEIRAKLRLQAQSLSTVGPRLASEYLTPEEMVTFKKTKRRVKKIRKKEKEVVVRADDLLPLGDQTQDGDFGSRLRGRGRRRVSEVEEEKEPVPQPLPSDDTRVENMDISDEEEGGAPPPGSPQVLEEDEAELELQKQLEKGRRLRQLQQLQQLRDSGEKVVEIVKKLESRQRGWEEDEDPERKGAIVFNATSEFCRTLGEIPTYGLAGNREEQEELMDFERDEERSANGGSESDGEENIGWSTVNLDEEKQQQDFSASSTTILDEEPIVNRGLAAALLLCQNKGLLETTVQKVARVKAPNKSLPSAVYCIEDKMAIDDKYSRREEYRGFTQDFKEKDGYKPDVKIEYVDETGRKLTPKEAFRQLSHRFHGKGSGKMKTERRMKKLDEEALLKKMSSSDTPLGTVALLQEKQKAQKTPYIVLSGSGKSMNANTITK

SEQ ID NO: 625 - protein, 958 aa, Artificial Sequence [sequence omitted]

SEQ ID NO: 626 - protein, 963 aa, Artificial Sequence
  SART-3__Homo_sapiens__Q15020
MATAAETSASEPEAESKAGPKADGEEDEVKAARTRRKVLSRAVAAATYKTMGPAWDQQEEGVSESDGDEYAMASSAESSPGEYEWEYDEEEEKNQLEIERLEEQLSINVYDYNCHVDLIRLLRLEGELTKVRMARQKMSEIFPLTEELWLEWLHDEISMAQDGLDREHVYDLFEKAVKDYICPNIWLEYGQYSVGGIGQKGGLEKVRSVFERALSSVGLHMTKGLALWEAYREFESAIVEAARLEKVHSLFRRQLAIPLYDMEATFAEYEEWSEDPIPESVIQNYNKALQQLEKYKPYEEALLQAEAPRLAEYQAYIDFEMKIGDPARIQLIFERALVENCLVPDLWIRYSQYLDRQLKVKDLVLSVHNRAIRNCPWTVALWSRYLLAMERHGVDHQVISVTFEKALNAGFIQATDYVEIWQAYLDYLRRRVDFKQDSSKELEELRAAFTRALEYLKQEVEERFNESGDPSCVIMQNWARIEARLCNNMQKARELWDSIMTRGNAKYANMWLEYYNLERAHGDTQHCRKALHRAVQCTSDYPEHVCEVLLTMERTEGSLEDWDIAVQKTETRLARVNEQRMKAAEKEAALVQQEEEKAEQRKRARAEKKALKKKKKIRGPEKRGADEDDEKEWGDDEEEQPSKRRRVENSIPAAGETQNVEVAAGPAGKCAAVDVEPPSKQKEKAASLKRDMPKVLHDSSKDSITVFVSNLPYSMQEPDTKLRPLFEACGEVVQIRPIFSNRGDFRGYCYVEFKEEKSALQALEMDRKSVEGRPMFVSPCVDKSKNPDFKVFRYSTSLEKHKLFISGLPFSCTKEELEEICKAHGTVKDLRLVTNRAGKPKGLAYVEYENESQASQAVMKMDGMTIKENIIKVAISNPPQRKVPEKPETRKAPGGPMLLPQTYGARGKGRTQLSLLPRALQRPSAAAPQAENGPAAAPAVAAPAATEAPKMSNADFAKLFLRK

SEQ ID NO: 627 - protein, 760 aa, Artificial Sequence
  SEPR__Homo_sapiens__Q12884
MKTWVKIVFGVATSAVLALLVMCIVLRPSRVHNSEENTMRALTLKDILNGTFSYKTFFPNWISGQEYLHQSADNNIVLYNIETGQSYTILSNRTMKSVNASNYGLSPDRQFVYLESDYSKLWRYSYTATYYIYDLSNGEFVRGNELPRPIQYLCWSPVGSKLAYVYQNNIYLKQRPGDPPFQITFNGRENKIFNGIPDWVYEEEMLATKYALWWSPNGKFLAYAEFNDTDIPVIAYSYYGDEQYPRTINIPYPKAGAKNPVVRIFIIDTTYPAYVGPQEVPVPAMIASSDYYFSWLTWVTDERVCLQWLKRVQNVSVLSICDFREDWQTWDCPKTQEHIEESRTGWAGGFFVSTPVFSYDAISYYKIFSDKDGYKHIHYIKDTVENAIQITSGKWEAINIFRVTQDSLFYSSNEFEEYPGRRNIYRISIGSYPPSKKCVTCHLRKERCQYYTASFSDYAKYYALVCYGPGIPISTLHDGRTDQEIKILEENKELENALKNIQLPKEEIKKLEVDEITLWYKMILPPQFDRSKKYPLLIQVYGGPCSQSVRSVFAVNWISYLASKEGMVIALVDGRGTAFQGDKLLYAVYRKLGVYEVEDQITAVRKFIEMGFIDEKRIAIWGWSYGGYVSSLALASGTGLFKCGIAVAPVSSWEYYASVYTERFMGLPTKDDNLEHYKNSTVMARAEYFRNVDYLLIHGTADDNVHFQNSAQIAKALVNAQVDFQAMWYSDQNHGLSGLSTNHLYTHMTHFLKQCFSLSD

SEQ ID NO: 628 - protein, 333 aa, Artificial Sequence
  SIA7F__Homo_sapiens__Q969X2
MACSRPPSQCEPTSLPPGPPAGRRHLPLSRRRREMSSNKEQRSAVFVILFALITILILYSSNSANEVFHYGSLRGRSRRPVNLKKWSITDGYVPILGNKTLPSRCHQCVIVSSSSHLLGTKLGPEIERAECTIRMNDAPTTGYSADVGNKTTYRVVAHSSVFRVLRRPQEFVNRTPETVFIFWGPPSKMQKPQGSLVRVIQRAGLVFPNMEAYAVSPGRMRQFDDLFRGETGKDREKSHSWLSTGWFTMVIAVELCDHVHVYGMVPPNYCSQRPRLQRMPYHYYEPKGPDECVTYIQNEHSRKGNHHRFITEKRVFSSWAQLYGITFSHPSWT

SEQ ID NO: 629 - protein, 356 aa, Artificial Sequence
  SIA8A__Homo_sapiens__Q92185
MSPCGRARRQTSRGAMAVLAWKFPRTRLPMGASALCVVVLCWLYIFPVYRLPNEKEIVQGVLQQGTAWRRNQTAARAFRKQMEDCCDPAHLFAMTKMNSPMGKSMWYDGEFLYSFTIDNSTYSLFPQATPFQLPLKKCAVVGNGGILKKSGCGRQIDEANFVMRCNLPPLSSEYTKDVGSKSQLVTANPSIIRQRFQNLLWSRKTFVDNMKIYNHSYIYMPAFSMKTGTEPSLRVYYTLSDVGANQTVLFANPNFLRSIGKFWKSRGIHAKRLSTGLFLVSAALGLCEEVAIYGFWPFSVNMHEQPISHHYYDNVLPFSGFHAMPEEFLQLWYLHKIGALRMQLDPCEDTSLQPTS

SEQ ID NO: 630 - protein, 418 aa, Artificial Sequence
  SIAT9__Homo_sapiens__Q9UNP4
MRTKAAGCAERRPLQPRTEAAAAPAGRAMPSEYTYVKLRSDCSRPSLQWYTRAQSKMRRPSLLLKDILKCTLLVFGVWILYILKLNYTTEECDMKKMHYVDPDHVKRAQKYAQQVLQKECRPKFAKTSMALLFEHRYSVDLLPFVQKAPKDSEAESKYDPPFGFRKFSSKVQTLLELLPEHDLPEHLKAKTCRRCVVIGSGGILHGLELGHTLNQFDVVIRLNSAPVEGYSEHVGNKTTIRMTYPEGAPLSDLEYYSNDLFVAVLFKSVDFNWLQAMVKKETLPFWVRLFFWKQVAEKIPLQPKHFRILNPVIIKETAFDILQYSEPQSRFWGRDKNVPTIGVIAVVLATHLCDEVSLAGFGYDLNQPRTPLHYFDSQCMAAMNFQTMHNVTTETKFLLKLVKEGVVKDLSGGIDREF

SEQ ID NO: 631 - protein, 352 aa, Artificial Sequence
  SIRT2/m__Homo_sapiens__A0A024R0G8
MDFLRNLFSQTLSLGSQKERLLDELTLEGVARYMQSERCRRVICLVGAGISTSAGIPDFRSPSTGLYDNLEKYHLPYPEAIFEISYFKKHPEPFFALAKELYPGQFKPTICHYFMRLLKDKGLLLRCYTQNIDTLERIAGLEQEDLVEAHGTFYTSHCVSASCRHEYPLSWMKEKIFSEVTPKCEDCQSLVKPDIVFFGESLPARFFSCMQSDFLKVDLLLVMGTSLQVQPFASLISKAPLSTPRLLINKEKAGQSDPFLGMIMGLGGGMDFDSKKAYRDVAWLGECDQGCLALAELLGWKKELEDLVRREHASIDAQSGAGVPNPSTSASPKKSPPPAKDEARTTEREKPQ

SEQ ID NO: 632 - protein, 389 aa, Artificial Sequence
  SIRT2/m__Homo_sapiens__Q8IXJ6
MAEPDPSHPLETQAGKVQEAQDSDSDSEGGAAGGEADMDFLRNLFSQTLSLGSQKERLLDELTLEGVARYMQSERCRRVICLVGAGISTSAGIPDFRSPSTGLYDNLEKYHLPYPEAIFEISYFKKHPEPFFALAKELYPGQFKPTICHYFMRLLKDKGLLLRCYTQNIDTLERIAGLEQEDLVEAHGTFYTSHCVSASCRHEYPLSWMKEKIFSEVTPKCEDCQSLVKPDIVFFGESLPARFFSCMQSDFLKVDLLLVMGTSLQVQPFASLISKAPLSTPRLLINKEKAGQSDPFLGMIMGLGGGMDFDSKKAYRDVAWLGECDQGCLALAELLGWKKELEDLVRREHASIDAQSGAGVPNPSTSASPKKSPPPAKDEARTTEREKPQ

SEQ ID NO: 633 - protein, 466 aa, Artificial Sequence
  SOX10__Homo_sapiens__P56693
MAEEQDLSEVELSPVGSEEPRCLSPGSAPSLGPDGGGGGSGLRASPGPGELGKVKKEQQDGEADDDKFPVCIREAVSQVLSGYDWTLVPMPVRVNGASKSKPHVKRPMNAFMVWAQAARRKLADQYPHLHNAELSKTLGKLWRLLNESDKRPFIEEAERLRMQHKKDHPDYKYQPRRRKNGKAAQGEAECPGGEAEQGGTAAIQAHYKSAHLDHRHPGEGSPMSDGNPEHPSGQSHGPPTPPTTPKTELQSGKADPKRDGRSMGEGGKPHIDFGNVDIGEISHEVMSNMETFDVAELDQYLPPNGHPGHVSSYSAAGYGLGSALAVASGHSAWISKPPGVALPTVSPPGVDAKAQVKTETAGPQGPPHYTDQPSTSQIAYTSLSLPHYGSAFPSISRPQFDYSDHQPSGPYYGHSGQASGLYSAFSYMGPSQRPLYTAISDPSPSGPQSHSPTHWEQPVYTTLSRP

SEQ ID NO: 634 - protein, 151 aa, Artificial Sequence
  SP17__Homo_sapiens__Q15506
MSIPFSNTHYRIPQGFGNLLEGLTREILREQPDNIPAFAAAYFESLLEKREKTNFDPAEWGSKVEDRFYNNHAFEEQEPPEKSDPKQEESQISGKEEETSVTILDSSEEDKEKEEVAAVKIQAAFRGHIAREEAKKMKTNSLQNEEKEENK

SEQ ID NO: 635 - protein, 97 aa, Artificial Sequence
  SPNXA__Homo_sapiens__Q9NS26
MDKQSSAGGVKRSVPCDSNEANEMMPETPTGDSDPQPAPKKMKTSESSTILVVRYRRNFKRTSPEELLNDHARENRINPLQMEEEEFMEIMVEIPAK

SEQ ID NO: 636 - protein, 141 aa, Artificial Sequence
  SPXN3__Homo_sapiens__Q5MJ09
MEQPTSSTNGEKTKSPCESNNKKNDEMQEVPNRVLAPEQSLKKTKTSEYPIIFVYYLRKGKKINSNQLENEQSQENSINPIQKEEDEGVDLSEGSSNEDEDLGPCEGPSKEDKDLDSSEGSSQEDEDLGLSEGSSQDSGED

SEQ ID NO: 637 - protein, 188 aa, Artificial Sequence
  SSX-1__Homo_sapiens__Q16384
MNGDDTFAKRPRDDAKASEKRSKAFDDIATYFSKKEWKKMKYSEKISYVYMKRNYKAMTKLGFKVTLPPFMCNKQATDFQGNDFDNDHNRRIQVEHPQMTFGRLHRIIPKIMPKKPAEDENDSKGVSEASGPQNDGKQLHPPGKANISEKINKRSGPKRGKHAWTHRLRERKQLVIYEEISDPEEDDE

SEQ ID NO: 638 - protein, 188 aa, Artificial Sequence
  SSX-2__Homo_sapiens__Q16385
MNGDDAFARRPTVGAQIPEKIQKAFDDIAKYFSKEEWEKMKASEKIFYVYMKRKYEAMTKLGFKATLPPFMCNKRAEDFQGNDLDNDPNRGNQVERPQMTFGRLQGISPKIMPKKPAEEGNDSEEVPEASGPQNDGKELCPPGKPTTSEKIHERSGPKRGEHAWTHRLRERKQLVIYEEISDPEEDDE

SEQ ID NO: 639 - protein, 188 aa, Artificial Sequence
  SSX3__Homo_sapiens__Q99909
MNGDDTFARRPTVGAQIPEKIQKAFDDIAKYFSKEEWEKMKVSEKIVYVYMKRKYEAMTKLGFKAILPSFMRNKRVTDFQGNDFDNDPNRGNQVQRPQMTFGRLQGIFPKIMPKKPAEEGNVSKEVPEASGPQNDGKQLCPPGKPTTSEKINMISGPKRGEHAWTHRLRERKQLVIYEEISDPEEDDE

SEQ ID NO: 640 - protein, 188 aa, Artificial Sequence
  SSX-4__Homo_sapiens__O60224
MNGDDAFARRPRDDAQISEKLRKAFDDIAKYFSKKEWEKMKSSEKIVYVYMKLNYEVMTKLGFKVTLPPFMRSKRAADFHGNDFGNDRNHRNQVERPQMTFGSLQRIFPKIMPKKPAEEENGLKEVPEASGPQNDGKQLCPPGNPSTLEKINKTSGPKRGKHAWTHRLRERKQLVVYEEISDPEEDDE

SEQ ID NO: 641 - protein, 295 aa, Artificial Sequence
  ST1A1__Homo_sapiens__P50225
MELIQDTSRPPLEYVKGVPLIKYFAEALGPLQSFQARPDDLLISTYPKSGTTWVSQILDMIYQGGDLEKCHRAPIFMRVPFLEFKAPGIPSGMETLKDTPAPRLLKTHLPLALLPQTLLDQKVKVVYVARNAKDVAVSYYHFYHMAKVHPEPGTWDSFLEKFMVGEVSYGSWYQHVQEWWELSRTHPVLYLFYEDMKENPKREIQKILEFVGRSLPEETVDFVVQHTSFKEMKKNPMTNYTTVPQEFMDHSISPFMRKGMAGDWKTTFTVAQNERFDADYAEKMAGCSLSFRSEL

SEQ ID NO: 642 - protein, 1268 aa, Artificial Sequence
  STAG2__Homo_sapiens__Q8N3U4-2
MIAAPEIPTDFNLLQESETHFSSDTDFEDIEGKNQKQGKGKTCKKGKKGPAEKGKGGNGGGKPPSGPNRMNGHHQQNGVENMMLFEVVKMGKSAMQSVVDDWIESYKHDRDIALLDLINFFIQCSGCKGVVTAEMFRHMQNSEIIRKMTEEFDEDSGDYPLTMAGPQWKKFKSSFCEFIGVLVRQCQYSIIYDEYMMDTVISLLTGLSDSQVRAFRHTSTLAAMKLMTALVNVALNLSINMDNTQRQYEAERNKMIGKRANERLELLLQKRKELQENQDEIENMMNAIFKGVFVHRYRDAIAEIRAICIEEIGIWMKMYSDAFLNDSYLKYVGWTMHDKQGEVRLKCLTALQGLYYNKELNSKLELFTSRFKDRIVSMTLDKEYDVAVQAIKLLTLVLQSSEEVLTAEDCENVYHLVYSAHRPVAVAAGEFLYKKLFSRRDPEEDGMMKRRGRQGPNANLVKTLVFFFLESELHEHAAYLVDSMWDCATELLKDWECMNSLLLEEPLSGEEALTDRQESALIEIMLCTIRQAAECHPPVGRGTGKRVLTAKEKKTQLDDRTKITELFAVALPQLLAKYSVDAEKVTNLLQLPQYFDLEIYTTGRLEKHLDALLRQIRNIVEKHTDTDVLEACSKTYHALCNEEFTIFNRVDISRSQLIDELADKFNRLLEDFLQEGEEPDEDDAYQVLSTLKRITAFHNAHDLSKWDLFACNYKLLKTGIENGDMPEQIVIHALQCTHYVILWQLAKITESSSTKEDLLRLKKQMRVFCQICQHYLTNVNTTVKEQAFTILCDILMIFSHQIMSGGRDMLEPLVYTPDSSLQSELLSFILDHVFIEQDDDNNSADGQQEDEASKIEALHKRRNLLAAFCKLIVYTVVEMNTAADIFKQYMKYYNDYGDIIKETMSKTRQIDKIQCAKTLILSLQQLFNEMIQENGYNFDRSSSTFSGIKELARRFALTFGLDQLKTREAIAMLHKDGIEFAFKEPNPQGESHPPLNLAFLDILSEFSSKLLRQDKRTVYVYLEKFMTFQMSLRREDVWLPLMSYRNSLLAGGDDDTMSVISGISSRGSTVRSKKSKPSTGKRKVVEGMQLSLTEESSSSDSMWLSREQTLHTPVMMQTPQLTSTIMREPKRLRPEDSFMSVYPMQTEHHQTPLDYNTQVTWMLAQRQQEEARQQQERAAMSYVKLRTNLQHAIRRGTSLMEDDEEPIVEDVMMSSEGRIEDLNEGMDFDTMDIDLPPSKNRRERTELKPDFFDPASIMDESVLGVSMF

SEQ ID NO: 643 - protein, 490 aa, Artificial Sequence
  STAMP-1__Homo_sapiens__Q8NFT2
MESISMMGSPKSLSETFLPNGINGIKDARKVTVGVIGSGDFAKSLTIRLIRCGYHVVIGSRNPKFASEFFPHVVDVTHHEDALTKTNIIFVAIHREHYTSLWDLRHLLVGKILIDVSNNMRINQYPESNAEYLASLFPDSLIVKGFNVVSAWALQLGPKDASRQVYICSNNIQARQQVIELARQLNFIPIDLGSLSSAREIENLPLRLFTLWRGPVVVAISLATFFFLYSFVRDVIHPYARNQQSDFYKIPIEIVNKTLPIVAITLLSLVYLAGLLAAAYQLYYGTKYRRFPPWLETWLQCRKQLGLLSFFFAMVHVAYSLCLPMRRSERYLFLNMAYQQVHANIENSWNEEEVWRIEMYISFGIMSLGLLSLLAVTSIPSVSNALNWREFSFIQSTLGYVALLISTFHVLIYGWKRAFEEEYYRFYTPPNFVLALVLPSIVILGKIILFLPCISRKLKRIKKGWEKSQFLEEGMGGTIPHVSPERVTVM

SEQ ID NO: 644 - protein, 258 aa, Artificial Sequence [sequence omitted]

SEQ ID NO: 645 - protein, 339 aa, Artificial Sequence
  STEAP-1__Homo_sapiens__Q9UHE8
MESRKDITNQEELWKMKPRRNLEEDDYLHKDTGETSMLKRPVLLHLHQTAHADEFDCPSELQHTQELFPQWHLPIKIAAIIASLTFLYTLLREVIHPLATSHQQYFYKIPILVINKVLPMVSITLLALVYLPGVIAAIVQLHNGTKYKKFPHWLDKWMLTRKQFGLLSFFFAVLHAIYSLSYPMRRSYRYKLLNWAYQQVQQNKEDAWIEHDVWRMEIYVSLGIVGLAILALLAVTSIPSVSDSLTWREFHYIQSKLGIVSLLLGTIHALIFAWNKWIDIKQFVWYTPPTFMIAVFLPIVVLIFKSILFLPCLRKKILKIRHGWEDVTKINKTEICSQL

SEQ ID NO: 646 - protein, 165 aa, Artificial Sequence
  Survivin-2B__Homo_sapiens__O15392-2
MGAPTLPPAWQPFLKDHRISTFKNWPFLEGCACTPERMAEAGFIHCPTENEPDLAQCFFCFKELEGWEPDDDPIGPGTVAYACNTSTLGGRGGRITREEHKKHSSGCAFLSVKKQFEELTLGEFLKLDRERAKNKIAKETNNKKKEFEETAEKVRRAIEQLAAMD

SEQ ID NO: 647 - protein, 142 aa, Artificial Sequence; identical to SEQ ID NO: 147
  survivin__Homo_sapiens__O15392

SEQ ID NO: 648 - protein, 976 aa, Artificial Sequence
  SYCP1__Homo_sapiens__A0A024R0I2
MEKQKPFALFVPPRSSSSQVSAVKPQTLGGDSTFFKSFNKCTEDDFEFPFAKTNLSKNGENIDSDPALQKVNFLPVLEQVGNSDCHYQEGLKDSDLENSEGLSRVYSKLYKEAEKIKKWKVSTEAELRQKESKLQENRKIIEAQRKAIQELQFGNEKVSLKLEEGIQENKDLIKENNATRHLCNLLKETCARSAEKTKKYEYEREETRQVYMDLNNNIEKMITAFEELRVQAENSRLEMHFKLKEDYEKIQHLEQEYKKEINDKEKQVSLLLIQITEKENKMKDLTFLLEESRDKVNQLEEKTKLQSENLKQSIEKQHHLTKELEDIKVSLQRSVSTQKALEEDLQIATKTICQLTEEKETQMEESNKARAAHSFVVTEFETTVCSLEELLRTEQQRLEKNEDQLKILTMELQKKSSELEEMTKLTNNKEVELEELKKVLGEKETLLYENKQFEKIAEELKGTEQELIGLLQAREKEVHDLEIQLTAITTSEQYYSKEVKDLKTELENEKLKNTELTSHCNKLSLENKELTQETSDMTLELKNQQEDINNNKKQEERMLKQIENLQETETQLRNELEYVREELKQKRDEVKCKLDKSEENCNNLRKQVENKNKYIEELQQENKALKKKGTAESKQLNVYEIKVNKLELELESAKQKFGEITDTYQKEIEDKKISEENLLEEVEKAKVIADEAVKLQKEIDKRCQHKIAEMVALMEKHKHQYDKIIEERDSELGLYKSKEQEQSSLRASLEIELSNLKAELLSVKKQLEIEREEKEKLKREAKENTATLKEKKDKKTQTFLLETPEIYWKLDSKAVPSQTVSRNFTSVDHGISKDKRDYLWTSAKNTLSTPLPKAYTVKTPTKPKLQQRENLNIPIEESKKKRKMAFEFDINSDSSETTDLLSMVSEEETLKTLYRNNNPPASHLCVKTPKKAPSSLTTPGSTLKFGAIRKMREDRWAVIAKMDRKKKLKEAEKLFV

SEQ ID NO: 649 - protein, 976 aa, Artificial Sequence [sequence omitted]

SEQ ID NO: 650 - protein, 976 aa, Artificial Sequence; identical to SEQ ID NO: 648
  SYCP1__Homo_sapiens__Q15431

SEQ ID NO: 651 - protein, 109 aa, Artificial Sequence [sequence omitted]

SEQ ID NO: 652 - protein, 488 aa, Artificial Sequence
  SYT-SSX-1__Homo_sapiens__A4PIV7
MSVAFAAPRQRGKGEITPAAIQKMLDDNNHLIQCIMDSQNKGKTSECSQYQQMLHTNLVYLATIADSNQNMQSLLPAPPTQNMPMGPGGMNQSGPPPPPRSHNMPSDGMVGGGPPAPHMQNQMNGQMPGPNHMPMQGPGPNQLNMTNSSMNMPSSSHGSMGGYNHSVPSSQSMPVQNQMTMSQGQPMGNYGPRPNMSMQPNQGPMMHQQPPSQQYNMPQGGGQHYQGQQPPMGMMGQVNQGNHMMGQRQIPPYRPPQQGPPQQYSGQEDYYGDQYSHGGQGPPEGMNQQYYPDGHNDYGYQQPSYPEQGYDRPYEDSSQHYYEGGNSQYGQQQDAYQGPPPQQGYPPQQQQYPGQQGYPGQQQGYGPSQGGPGPQYPNYPQGQGQQYGGYRPTQPGPPQPPQQRPYGYDQIMPKKPAEDENDSKGVSEASGPQNDGKQLHPPGKANISEKINKRSGPKRGKHAWTHRLRERKQLVIYEEISDPEEDDE

SEQ ID NO: 653 - protein, 457 aa, Artificial Sequence
  SYT-SSX-1__Homo_sapiens__A4PIV8
MSVAFAAPRQRGKGEITPAAIQKMLDDNNHLIQCIMDSQNKGKTSECSQYQQMLHTNLVYLATIADSNQNMQSLLPAPPTQNMPMGPGGMNQSGPPPPPRSHNMPSDGMVGGGPPAPHMQNQMNGQMPGPNHMPMQGPGPNQLNMTNSSMNMPSSSHGSMGGYNHSVPSSQSMPVQNQMTMSQGQPMGNYGPRPNMSMQPNQGPMMHQQPPSQQYNMPQGGGQHYQGQQPPMGMMGQVNQGNHMMGQRQIPPYRPPQQGPPQQYSGQEDYYGDQYSHGGQGPPEGMNQQYYPDGNSQYGQQQDAYQGPPPQQGYPPQQQQYPGQQGYPGQQQGYGPSQGGPGPQYPNYPQGQGQQYGGYRPTQPGPPQPPQQRPYGYDQIMPKKPAEDENDSKGVSEASGPQNDGKQLHPPGKANISEKINKRSGPKRGKHAWTHRLRERKQLVIYEEISDPEEDDE

SEQ ID NO: 654 - protein, 488 aa, Artificial Sequence
  SYT-SSX-2__Homo_sapiens__A4PIV9
MSVAFAAPRQRGKGEITPAAIQKMLDDNNHLIQCIMDSQNKGKTSECSQYQQMLHTNLVYLATIADSNQNMQSLLPAPPTQNMPMGPGGMNQSGPPPPPRSHNMPSDGMVGGGPPAPHMQNQMNGQMPGPNHMPMQGPGPNQLNMTNSSMNMPSSSHGSMGGYNHSVPSSQSMPVQNQMTMSQGQPMGNYGPRPNMSMQPNQGPMMHQQPPSQQYNMPQGGGQHYQGQQPPMGMMGQVNQGNHMMGQRQIPPYRPPQQGPPQQYSGQEDYYGDQYSHGGQGPPEGMNQQYYPDGHNDYGYQQPSYPEQGYDRPYEDSSQHYYEGGNSQYGQQQDAYQGPPPQQGYPPQQQQYPGQQGYPGQQQGYGPSQGGPGPQYPNYPQGQGQQYGGYRPTQPGPPQPPQQRPYGYDQIMPKKPAEEGNDSEEVPEASGPQNDGKELCPPGKPTTSEKIHERSGPKRGEHAWTHRLRERKQLVIYEEISDPEEDDE

SEQ ID NO: 655 - protein, 457 aa, Artificial Sequence
  SYT-SSX-2__Homo_sapiens__A4PIW0
MSVAFAAPRQRGKGEITPAAIQKMLDDNNHLIQCIMDSQNKGKTSECSQYQQMLHTNLVYLATIADSNQNMQSLLPAPPTQNMPMGPGGMNQSGPPPPPRSHNMPSDGMVGGGPPAPHMQNQMNGQMPGPNHMPMQGPGPNQLNMTNSSMNMPSSSHGSMGGYNHSVPSSQSMPVQNQMTMSQGQPMGNYGPRPNMSMQPNQGPMMHQQPPSQQYNMPQGGGQHYQGQQPPMGMMGQVNQGNHMMGQRQIPPYRPPQQGPPQQYSGQEDYYGDQYSHGGQGPPEGMNQQYYPDGNSQYGQQQDAYQGPPPQQGYPPQQQQYPGQQGYPGQQQGYGPSQGGPGPQYPNYPQGQGQQYGGYRPTQPGPPQPPQQRPYGYDQIMPKKPAEEGNDSEEVPEASGPQNDGKELCPPGKPTTSEKIHERSGPKRGEHAWTHRLRERKQLVIYEEISDPEEDDE

SEQ ID NO: 656 - protein, 111 aa, Artificial Sequence
  TARP__Homo_sapiens__Q0VGM3
MKTNDTYMKFSWLTVPEKSLDKEHRCIVRHENNKNGVDQEIIFPPIKTDVITMDPKDNCSKDANDTLLLQLTNTSAYYMYLLLLLKSVVYFAIITCCLLRRTAFCCNGEKS

SEQ ID NO: 657 - protein, 58 aa, Artificial Sequence
  TCRg__Homo_sapiens__A2JGV3
MQMFPPSPLFFFLQLLKQSSRRLEHTFVFLRNFSLMLLRYIGKKRRATRFWDPRRGTP

SEQ ID NO: 658 - protein, 376 aa, Artificial Sequence
  TF2AA__Homo_sapiens__P52655
MANSANTNTVPKLYRSVIEDVINDVRDIFLDDGVDEQVLMELKTLWENKLMQSRAVDGFHSEEQQLLLQVQQQHQPQQQQHHHHHHHQQAQPQQTVPQQAQTQQVLIPASQQATAPQVIVPDSKLIQHMNASNMSAAATAATLALPAGVTPVQQILTNSGQLLQVVRAANGAQYIFQPQQSVVLQQQVIPQMQPGGVQAPVIQQVLAPLPGGISPQTGVIIQPQQILFTGNKTQVIPTTVAAPTPAQAQITATGQQQPQAQPAQTQAPLVLQVDGTGDTSSEEDEDEEEDYDDDEEEDKEKDGAEDGQVEEEPLNSEDDVSDEEGQELFDTENVVVCQYDKIHRSKNKWKFHLKDGIMNLNGRDYIFSKAIGDAEW

SEQ ID NO: 659 - protein, 567 aa, Artificial Sequence
  TGFR2__Homo_sapiens__P37173
MGRGLLRGLWPLHIVLWTRIASTIPPHVQKSVNNDMIVTDNNGAVKFPQLCKFCDVRFSTCDNQKSCMSNCSITSICEKPQEVCVAVWRKNDENITLETVCHDPKLPYHDFILEDAASPKCIMKEKKKPGETFFMCSCSSDECNDNIIFSEEYNTSNPDLLLVIFQVTGISLLPPLGVAISVIIIFYCYRVNRQQKLSSTWETGKTRKLMEFSEHCAIILEDDRSDISSTCANNINHNTELLPIELDTLVGKGRFAEVYKAKLKQNTSEQFETVAVKIFPYEEYASWKTEKDIFSDINLKHENILQFLTAEERKTELGKQYWLITAFHAKGNLQEYLTRHVISWEDLRKLGSSLARGIAHLHSDHTPCGRPKMPIVHRDLKSSNILVKNDLTCCLCDFGLSLRLDPTLSVDDLANSGQVGTARYMAPEVLESRMNLENVESFKQTDVYSMALVLWEMTSRCNAVGEVKDYEPPFGSKVREHPCVESMKDNVLRDRGRPEIPSFWLNHQGIQMVCETLTECWDHDPEARLTAQCVAERFSELEHLDRLSGRSCSEEKIPEDGSLNTTK

SEQ ID NO: 660 - protein, 684 aa, Artificial Sequence [sequence omitted]

SEQ ID NO: 661 - protein, 1124 aa, Artificial Sequence
  TIE2__Homo_sapiens__Q02763
MDSLASLVLCGVSLLLSGTVEGAMDLILINSLPLVSDAETSLTCIASGWRPHEPITIGRDFEALMNQHQDPLEVTQDVTREWAKKVVWKREKASKINGAYFCEGRVRGEAIRIRTMKMRQQASFLPATLTMTVDKGDNVNISFKKVLIKEEDAVIYKNGSFIHSVPRHEVPDILEVHLPHAQPQDAGVYSARYIGGNLFTSAFTRLIVRRCEAQKWGPECNHLCTACMNNGVCHEDTGECICPPGFMGRTCEKACELHTFGRTCKERCSGQEGCKSYVFCLPDPYGCSCATGWKGLQCNEACHPGFYGPDCKLRCSCNNGEMCDRFQGCLCSPGWQGLQCEREGIQRMTPKIVDLPDHIEVNSGKFNPICKASGWPLPTNEEMTLVKPDGTVLHPKDFNHTDHFSVAIFTIHRILPPDSGVWVCSVNTVAGMVEKPFNISVKVLPKPLNAPNVIDTGHNFAVINISSEPYFGDGPIKSKKLLYKPVNHYEAWQHIQVTNEIVTLNYLEPRTEYELCVQLVRRGEGGEGHPGPVRRFTTASIGLPPPRGLNLLPKSQTTLNLTWQPIFPSSEDDFYVEVERRSVQKSDQQNIKVPGNLTSVLLNNLHPREQYVVRARVNTKAQGEWSEDLTAWTLSDILPPQPENIKISNITHSSAVISWTILDGYSISSITIRYKVQGKNEDQHVDVKIKNATITQYQLKGLEPETAYQVDIFAENNIGSSNPAFSHELVTLPESQAPADLGGGKMLLIAILGSAGMTCLTVLLAFLIILQLKRANVQRRMAQAFQNVREEPAVQFNSGTLALNRKVKNNPDPTIYPVLDWNDIKFQDVIGEGNFGQVLKARIKKDGLRMDAAIKRMKEYASKDDHRDFAGELEVLCKLGHHPNIINLLGACEHRGYLYLAIEYAPHGNLLDFLRKSRVLETDPAFAIANSTASTLSSQQLLHFAADVARGMDYLSQKQFIHRDLAARNILVGENYVAKIADFGLSRGQEVYVKKTMGRLPVRWMAIESLNYSVYTTNSDVWSYGVLLWEIVSLGGTPYCGMTCAELYEKLPQGYRLEKPLNCDDEVYDLMRQCWREKPYERPSFAQILVSLNRMLEERKTYVNTTLYEKFTYAGIDCSAEEAA

SEQ ID NO: 662 - protein, 596 aa, Artificial Sequence
  TKTL1__Homo_sapiens__P51854
MADAEARAEFPEEARPDRGTLQVLQDMASRLRIHSIRATCSTSSGHPTSCSSSSEIMSVLFFYIMRYKQSDPENPDNDRFVLAKRLSFVDVATGWLGQGLGVACGMAYTGKYFDRASYRVFCLMSDGESSEGSVWEAMAFASYYSLDNLVAIFDVNRLGHSGALPAEHCINIYQRRCEAFGWNTYVVDGRDVEALCQVFWQASQVKHKPTAVVAKTFKGRGTPSIEDAESWHAKPMPRERADAIIKLIESQIQTSRNLDPQPPIEDSPEVNITDVRMTSPPDYRVGDKIATRKACGLALAKLGYANNRVVVLDGDTRYSTFSEIFNKEYPERFIECFMAEQNMVSVALGCASRGRTIAFASTFAAFLTRAFDHIRIGGLAESNINIIGSHCGVSVGDDGASQMALEDIAMFRTIPKCTIFYPTDAVSTEHAVALAANAKGMCFIRTTRPETMVIYTPQERFEIGQAKVLRHCVSDKVTVIGAGITVYEALAAADELSKQDIFIRVIDLFTIKPLDVATIVSSAKATEGRIITVEDHYPQGGIGEAVCAAVSMDPDIQVHSLAVSGVPQSGKSEELLDMYGISARHIIVAVKCMLLN

SEQ ID NO: 663 - protein, 286 aa, Artificial Sequence
  TPI/m__Homo_sapiens__P60174
MAEDGEEAEFHFAALYISGQWPRLRADTDLQRLGSSAMAPSRKFFVGGNWKMNGRKQSLGELIGTLNAAKVPADTEVVCAPPTAYIDFARQKLDPKIAVAAQNCYKVTNGAFTGEISPGMIKDCGATWVVLGHSERRHVFGESDELIGQKVAHALAEGLGVIACIGEKLDEREAGITEKVVFEQTKVIADNVKDWSKVVLAYEPVWAIGTGKTATPQQAQEVHEKLRGWLKSNVSDAVAQSTRIIYGGSVTGATCKELASQPDVDGFLVGGASLKPEFVDIINAKQ

SEQ ID NO: 664 - protein, 119 aa, Artificial Sequence
  TRGV11__Homo_sapiens__Q99601
MPLVVAVIFFSLWVFALGQLEQPEISISRPANKSAHISWKASIQGFSSKIIHWYWQKPNKGLEYLLHVFLTISAQDCSGGKTKKLEVSKNAHTSTSTLKIKFLEKEDEVVYHCACWIRH

SEQ ID NO: 665 - protein, 137 aa, Artificial Sequence
  TRGV9__Homo_sapiens__A4D1X2
MLSLLHTSTLAVLGALCVYGAGHLEQPQISSTKTLSKTARLECVVSGITISATSVYWYRERPGEVIQFLVSISYDGTVRKESGIPSGKFEVDRIPETSTSTLTIHNVEKQDIATYYCALWEVHSSRQFEPSHSINVY

SEQ ID NO: 666 - protein, 122 aa, Artificial Sequence
  TRGV9__Homo_sapiens__Q99603
MLSLLHTSTLAVLGALCVYGAGHLEQPQISSTKTLSKTARLECVVSGITISATSVYWYRERPGEVIQFLVSISYDGTVRKESGIPSGKFEVDRIPETSTSTLTIHNVEKQDIATYYCALWEV

SEQ ID NO: 667 - protein, 122 aa, Artificial Sequence
  TRGV9__Homo_sapiens__Q99604
MLSLLHTSTLAVLGALCVYGAGHLEQPQISSTKTLSKTARLECVVSGIKISATSVYWYRERPGEVIQFLVSISYDGTVRKESGIPSGKFEVDRIPETSTSTLTIHNVEKQDIATYYCALWEV

SEQ ID NO: 668 - protein, 793 aa, Artificial Sequence
  TRPC1__Homo_sapiens__P48995
MMAALYPSTDLSGASSSSLPSSPSSSSPNEVMALKDVREVKEENTLNEKLFLLACDKGDYYMVKKILEENSSGDLNINCVDVLGRNAVTITIENENLDILQLLLDYGCQSADALLVAIDSEVVGAVDILLNHRPKRSSRPTIVKLMERIQNPEYSTTMDVAPVILAAHRNNYEILTMLLKQDVSLPKPHAVGCECTLCSAKNKKDSLRHSRFRLDIYRCLASPALIMLTEEDPILRAFELSADLKELSLVEVEFRNDYEELARQCKMFAKDLLAQARNSRELEVILNHTSSDEPLDKRGLLEERMNLSRLKLAIKYNQKEFVSQSNCQQFLNTVWFGQMSGYRRKPTCKKIMTVLTVGIFWPVLSLCYLIAPKSQFGRIIHTPFMKFIIHGASYFTFLLLLNLYSLVYNEDKKNTMGPALERIDYLLILWIIGMIWSDIKRLWYEGLEDFLEESRNQLSFVMNSLYLATFALKVVAHNKFHDFADRKDWDAFHPTLVAEGLFAFANVLSYLRLFFMYTTSSILGPLQISMGQMLQDFGKFLGMFLLVLFSFTIGLTQLYDKGYTSKEQKDCVGIFCEQQSNDTFHSFIGTCFALFWYIFSLAHVAIFVTRFSYGEELQSFVGAVIVGTYNVVVVIVLTKLLVAMLHKSFQLIANHEDKEWKFARAKLWLSYFDDKCTLPPPFNIIPSPKTICYMISSLSKWICSHTSKGKVKRQNSLKEWRNLKQKRDENYQKVMCCLVHRYLTSMRQKMQSTDQATVENLNELRQDLSKFRNEIRDLLGFRTSKYAMFYPRN

SEQ ID NO: 669 - protein, 1104 aa, Artificial Sequence
  TRP-p8__Homo_sapiens__Q7Z2W7
MSFRAARLSMRNRRNDTLDSTRTLYSSASRSTDLSYSESDLVNFIQANFKKRECVFFTKDSKATENVCKCGYAQSQHMEGTQINQSEKWNYKKHTKEFPTDAFGDIQFETLGKKGKYIRLSCDTDAEILYELLTQHWHLKTPNLVISVTGGAKNFALKPRMRKIFSRLIYIAQSKGAWILTGGTHYGLMKYIGEVVRDNTISRSSEENIVAIGIAAWGMVSNRDTLIRNCDAEGYFLAQYLMDDFTRDPLYILDNNHTHLLLVDNGCHGHPTVEAKLRNQLEKYISERTIQDSNYGGKIPIVCFAQGGGKETLKAINTSIKNKIPCVVVEGSGQIADVIASLVEVEDALTSSAVKEKLVRFLPRTVSRLPEEETESWIKWLKEILECSHLLTVIKMEEAGDEIVSNAISYALYKAFSTSEQDKDNWNGQLKLLLEWNQLDLANDEIFTNDRRWESADLQEVMFTALIKDRPKFVRLFLENGLNLRKFLTHDVLTELFSNHFSTLVYRNLQIAKNSYNDALLTFVWKLVANFRRGFRKEDRNGRDEMDIELHDVSPITRHPLQALFIWAILQNKKELSKVIWEQTRGCTLAALGASKLLKTLAKVKNDINAAGESEELANEYETRAVELFTECYSSDEDLAEQLLVYSCEAWGGSNCLELAVEATDQHFIAQPGVQNFLSKQWYGEISRDTKNWKIILCLFIIPLVGCGFVSFRKKPVDKHKKLLWYYVAFFTSPFVVFSWNVVFYIAFLLLFAYVLLMDFHSVPHPPELVLYSLVFVLFCDEVRQWYVNGVNYFTDLWNVMDTLGLFYFIAGIVFRLHSSNKSSLYSGRVIFCLDYIIFTLRLIHIFTVSRNLGPKIIMLQRMLIDVFFFLFLFAVWMVAFGVARQGILRQNEQRWRWIFRSVIYEPYLAMFGQVPSDVDGTTYDFAHCTFTGNESKPLCVELDEHNLPRFPEWITIPLVCIYMLSTNILLVNLLVAMFGYTVGTVQENNDQVWKFQRYFLVQEYCSRLNIPFPFIVFAYFYMVVKKCFKCCCKEKNMESSVCCFKNEDNETLAWEGVMKENYLVKINTKANDTSEEMRHRFRQLDTKLNDLKGLLKEIANKIK

SEQ ID NO: 670 - protein, 698 aa, Artificial Sequence
  TSG10__Homo_sapiens__Q9BZW7
MMRSRSKSPRRPSPTARGANCDVELLKTTTRDREELKCMLEKYERHLAEIQGNVKVLKSERDKIFLLYEQAQEEITRLRREMMKSCKSPKSTTAHAILRRVETERDVAFTDLRRMTTERDSLRERLKIAQETAFNEKAHLEQRIEELECTVHNLDDERMEQMSNMTLMKETISTVEKEMKSLARKAMDTESELGRQKAENNSLRLLYENTEKDLSDTQRHLAKKKYELQLTQEKIMCLDEKIDNFTRQNIAQREEISILGGTLNDLAKEKECLQACLDKKSENIASLGESLAMKEKTISGMKNIIAEMEQASRQCTEALIVCEQDVSRMRRQLDETNDELAQIARERDILAHDNDNLQEQFAKAKQENQALSKKLNDTHNELNDIKQKVQDTNLEVNKLKNILKSEESENRQMMEQLRKANEDAENWENKARQSEADNNTLKLELITAEAEGNRLKEKVDSLNREVEQHLNAERSYKSQISTLHKSVVKMEEELQKVQFEKVSALADLSSTRELCIKLDSSKELLNRQLVAKDQEIEMRENELDSAHSEIELLRSQMANERISMQNLEALLVANRDKEYQSQIALQEKESEIQLLKEHLCLAENKMAIQSRDVAQFRNVVTQLEADLDITKRQLGTERFERERAVQELRRQNYSSNAYHMSSTMKPNTKCHSPERAHHRSPDRGLDRSLEENLCYRDF

SEQ ID NO: 671 - protein, 308 aa, Artificial Sequence
  TSPY1__Homo_sapiens__Q01534
MRPEGSLTYRVPERLRQGFCGVGRAAQALVCASAKEGTAFRMEAVQEGAAGVESEQAALGEEAVLLLDDIMAEVEVVAEEEGLVERREEAQRAQQAVPGPGPMTPESAPEELLAVQVELEPVNAQARKAFSRQREKMERRRKPHLDRRGAVIQSVPGFWANVIANHPQMSALITDEDEDMLSYMVSLEVGEEKHPVHLCKIMLFFRSNPYFQNKVITKEYLVNITEYRASHSTPIEWYPDYEVEAYRRRHHNSSLNFFNWFSDHNFAGSNKIAEILCKDLWRNPLQYYKRMKPPEEGTETSGDSQLLS

SEQ ID NO: 672 - protein, 122 aa, Artificial Sequence
  TVC_(TRGV3)__Homo_sapiens__M13231.1
MRWALLVLLAFLSPASQKSSNLEGRTKSVTRQTGSSAEITCDLTVTNTFYIHWYLHQEGKAPQRLLYYDVSTARDVLESGLSPGKYYTHTPRRWSWILRLQNLIENDSGVYYCATWDRQKLL

SEQ ID NO: 673 - protein, 267 aa, Artificial Sequence
  TX101__Homo_sapiens__Q9BY14-2
MGARQIQTSSSQTSPEEAMGTPRIQHLLILLVLGASLLTSGLELYCQKGLSMTVEADPANMFNWTTEEVETCDKGALCQETILIIKAGTETAILATKGCIPEGEEAITIVQHSSPPGLIVTSYSNYCEDSFCNDKDSLSQFWEFSETTASTVSTTLHCPTCVALGTCFSAPSLPCPNGTTRCYQGKLEITGGGIESSVEVKGCTAMIGCRLMSGILAVGPMFVREACPHQLLTQPRKTENGATCLPIPVWGLQLLLPLLLPSFIHFS

SEQ ID NO: 674 - protein, 529 aa, Artificial Sequence [sequence omitted]

SEQ ID NO: 675 - protein, 529 aa, Artificial Sequence [sequence omitted]

SEQ ID NO: 676 - protein, 529 aa, Artificial Sequence [sequence omitted]

SEQ ID NO: 677 - protein, 529 aa, Artificial Sequence [sequence omitted]

SEQ ID NO: 678 - protein, 237 aa, Artificial Sequence [sequence omitted]

SEQ ID NO: 679 - protein, 529 aa, Artificial Sequence [sequence omitted]

SEQ ID NO: 680 - protein, 529 aa, Artificial Sequence [sequence omitted]

SEQ ID NO: 681 - protein, 529 aa, Artificial Sequence [sequence omitted]

SEQ ID NO: 682 - protein, 529 aa, Artificial Sequence [sequence omitted]

SEQ ID NO: 683 - protein, 537 aa, Artificial Sequence
  TYRP1__Homo_sapiens__P17643
MSAPKLLSLGCIFFPLLLFQQARAQFPRQCATVEALRSGMCCPDLSPVSGPGTDRCGSSSGRGRCEAVTADSRPHSPQYPHDGRDDREVWPLRFFNRTCHCNGNFSGHNCGTCRPGWRGAACDQRVLIVRRNLLDLSKEEKNHFVRALDMAKRTTHPLFVIATRRSEEILGPDGNTPQFENISIYNYFVWTHYYSVKKTFLGVGQESFGEVDFSHEGPAFLTWHRYHLLRLEKDMQEMLQEPSFSLPYWNFATGKNVCDICTDDLMGSRSNFDSTLISPNSVFSQWRVVCDSLEDYDTLGTLCNSTEDGPIRRNPAGNVARPMVQRLPEPQDVAQCLEVGLFDTPPFYSNSTNSFRNTVEGYSDPTGKYDPAVRSLHNLAHLFLNGTGGQTHLSPNDPIFVLLHTFTDAVFDEWLRRYNADISTFPLENAPIGHNRQYNMVPFWPPVTNTEMFVTAPDNLGYTYEIQWPSREFSVPEIIAIAVVGALLLVALIFGTASYLIRARRSMDEANQPLLTDQYQCYAEEYEKLQNPNQSVV

SEQ ID NO: 684 - protein, 519 aa, Artificial Sequence
  TYRP2__Homo_sapiens__P40126
MSPLWWGFLLSCLGCKILPGAQGQFPRVCMTVDSLVNKECCPRLGAESANVCGSQQGRGQCTEVRADTRPWSGPYILRNQDDRELWPRKFFHRTCKCTGNFAGYNCGDCKFGWTGPNCERKKPPVIRQNIHSLSPQEREQFLGALDLAKKRVHPDYVITTQHWLGLLGPNGTQPQFANCSVYDFFVWLHYYSVRDTLLGPGRPYRAIDFSHQGPAFVTWHRYHLLCLERDLQRLIGNESFALPYWNFATGRNECDVCTDQLFGAARPDDPTLISRNSRFSSWETVCDSLDDYNHLVTLCNGTYEGLLRRNQMGRNSMKLPTLKDIRDCLSLQKFDNPPFFQNSTFSFRNALEGFDKADGTLDSQVMSLHNLVHSFLNGTNALPHSAANDPIFVVLHSFTDAIFDEWMKRFNPPADAWPQELAPIGHNRMYNMVPFFPPVTNEELFLTSDQLGYSYAIDLPVSVEETPGWPTTLLVVMGTLVALVGLFVLLAFLQYRRLRKGYTPLMETHLSSKRYTEEA

SEQ ID NO: 685 - protein, 151 aa, Artificial Sequence
  UPA__Homo_sapiens__Q96NZ9
MRRLLLVTSLVVVLLWEAGAVPAPKVPIKMQVKHWPSEQDPEKAWGARVVEPPEKDDQLVVLFPVQKPKLLTTEEKPRGQGRGPILPGTKAWMETEDTLGHVLSPEPDHDSLYHPPPEEDQGEERPRLWVMPNHQVLLGPEEDQDHIYHPQ

SEQ ID NO: 686 - protein, 174 aa, Artificial Sequence [sequence omitted]

SEQ ID NO: 687 - protein, 249 aa, Artificial Sequence
  WT1__Homo_sapiens__A0A0H5AUY0
MGSDVRDLNALLPAVPSLGGGGGCALPVSGAAQWAPVLDFAPPGASAYGSLGGPAPPPAPPPPPPPPPHSFIKQEPSWGGAEPHEEQCLSAFTVHFSGQFTGTAGACRYGPFGPPPPSQASSGQARMFPNAPYLPSCLESQPAIRNQGYSTVTFDGTPSYGHTPSHHAAQFPNHSFKHEDPMGQQGSLGEQQYSVPPPVYGCHTPTDSCTGSQALLLRTPYSSDNLYQMTSQLECMTWNQMNLGATLKG

SEQ ID NO: 688 - protein, 449 aa, Artificial Sequence; identical to SEQ ID NO: 188
  WT1__Homo_sapiens__P19544

SEQ ID NO: 689 - protein, 92 aa, Artificial Sequence
  WT1__Homo_sapiens__Q06250
MQRRGQPLENHVALIHWQSAGIPASKVHNYCNMKKSRLGRSRAVRISQPLLSPRRCPLHLTERGAGLLQPQPQGPVRTPGPPSGSHPAAADN

SEQ ID NO: 690 - protein, 81 aa, Artificial Sequence
  XAGE1__Homo_sapiens__Q9HD64
MESPKKKNQQLKVGILHLGSRQKKIRIQLRSQCATWKVICKSCISQTPGINLDLGSGVKVKIIPKEEHCKMPEAGEEQPQV

SEQ ID NO: 691 - protein, 178 aa, Artificial Sequence
  IL-10__Homo_sapiens__P22301
MHSSALLCCLVLLTGVRASPGQGTQSENSCTHFPGNLPNMLRDLRDAFSRVKTFFQMKDQLDNLLLKESLLEDFKGYLGCQALSEMIQFYLEEVMPQAENQDPDIKAHVNSLGENLKTLRLRLRRCHRFLPCENKSKAVEQVKNAFNKLQEKGIYKAMSEFDIFINYIEAYMTMKIRN

SEQ ID NO: 692 - protein, 134 aa, Artificial Sequence
  IL-5__Homo_sapiens__P05113
MRMLLHLSLLALGAAYVYAIPTEIPTSALVKETLALLSTHRTLLIANETLRIPVPVHKNHQLCTEEIFQGIGTLESQTVQGGTVERLFKNLSLIKKYIDGQKKKCGEERRRVNQFLDYLQEFLGVMNTEWIIES

SEQ ID NO: 693 - protein, 554 aa, Artificial Sequence
  M-CSF__Homo_sapiens__P09603
MTAPGAAGRCPPTTWLGSLLLLVCLLASRSITEEVSEYCSHMIGSGHLQSLQRLIDSQMETSCQITFEFVDQEQLKDPVCYLKKAFLLVQDIMEDTMRFRDNTPNAIAIVQLQELSLRLKSCFTKDYEEHDKACVRTFYETPLQLLEKVKNVFNETKNLLDKDWNIFSKNCNNSFAECSSQDVVTKPDCNCLYPKAIPSSDPASVSPHQPLAPSMAPVAGLTWEDSEGTEGSSLLPGEQPLHTVDPGSAKQRPPRSTCQSFEPPETPVVKDSTIGGSPQPRPSVGAFNPGMEDILDSAMGTNWVPEEASGEASEIPVPQGTELSPSRPGGGSMQTEPARPSNFLSASSPLPASAKGQQPADVTGTALPRVGPVRPTGQDWNHTPQKTDHPSALLRDPPEPGSPRISSLRPQGLSNPSTLSAQPQLSRSHSSGSVLPLGELEGRRSTRDRRSPAEPEGGPASEGAARPLPRFNSVPLTDTGHERQSEGSFSPQLQESVFHLLVPSVILVLLAVGGLLFYRWRRRSHQEPQRADSPLEQPEGSPLTQDDRQVELPV

SEQ ID NO: 694 - protein, 390 aa, Artificial Sequence
  TGFbeta1__Homo_sapiens__P01137
MPPSGLRLLLLLLPLLWLLVLTPGRPAAGLSTCKTIDMELVKRKRIEAIRGQILSKLRLASPPSQGEVPPGPLPEAVLALYNSTRDRVAGESAEPEPEPEADYYAKEVTRVLMVETHNEIYDKFKQSTHSIYMFFNTSELREAVPEPVLLSRAELRLLRLKLKVEQHVELYQKYSNNSWRYLSNRLLAPSDSPEWLSFDVTGVVRQWLSRGGEIEGFRLSAHCSCDSRDNTLQVDINGFTTGRRGDLATIHGMNRPFLLLMATPLERAQHLQSSRHRRALDTNYCFSSTEKNCCVRQLYIDFRKDLGWKWIHEPKGYHANFCLGPCPYIWSLDTQYSKVLALYNQHNPGASAAPCCVPQALEPLPIVYYVGRKPKVEQLSNMIVRSCKCS

SEQ ID NO: 695 - protein, 479 aa, Artificial Sequence
  Caspase_8__Homo_sapiens__Q14790
MDFSRNLYDIGEQLDSEDLASLKFLSLDYIPQRKQEPIKDALMLFQRLQEKRMLEESNLSFLKELLFRINRLDLLITYLNTRKEEMERELQTPGRAQISAYRVMLYQISEEVSRSELRSFKFLLQEEISKCKLDDDMNLLDIFIEMEKRVILGEGKLDILKRVCAQINKSLLKIINDYEEFSKERSSSLEGSPDEFSNGEELCGVMTISDSPREQDSESQTLDKVYQMKSKPRGYCLIINNHNFAKAREKVPKLHSIRDRNGTHLDAGALTTTFEELHFEIKPHDDCTVEQIYEILKIYQLMDHSNMDCFICCILSHGDKGIIYGTDGQEAPIYELTSQFTGLKCPSLAGKPKVFFIQACQGDNYQKGIPVETDSEEQPYLEMDLSSPQTRYIPDEADFLLGMATVNNCVSYRNPAEGTWYIQSLCQSLRERCPRGDDILTILTEVNYEVSNKDDKKNMGKQMPQPTFTLRKKLVFPSD

SEQ ID NO: 696 - protein, 375 aa, Artificial Sequence
  SERPINB5__Homo_sapiens__P36952
MDALQLANSAFAVDLFKQLCEKEPLGNVLFSPICLSTSLSLAQVGAKGDTANEIGQVLHFENVKDVPFGFQTVTSDVNKLSSFYSLKLIKRLYVDKSLNLSTEFISSTKRPYAKELETVDFKDKLEETKGQINNSIKDLTDGHFENILADNSVNDQTKILVVNAAYFVGKWMKKFSESETKECPFRVNKTDTKPVQMMNMEATFCMGNIDSINCKIIELPFQNKHLSMFILLPKDVEDESTGLEKIEKQLNSESLSQWTNPSTMANAKVKLSIPKFKVEKMIDPKACLENLGLKHIFSEDTSDFSGMSETKGVALSNVIHKVCLEITEDGGDSIEVPGARILQHKDELNADHPFIYIIRHNKTRNIIFFGKFCSP

SEQ ID NO: 697 - protein, 212 aa, Artificial Sequence [sequence omitted]

SEQ ID NO: 698 - protein, 296 aa, Artificial Sequence
  calreticulin__Homo_sapiens__B4E2Y9
MHGDSEYNIMFGPDICGPGTKKVHVIFNYKGKNVLINKDIRCKDDEFTHLYTLIVRPDNTYEVKIDNSQVESGSLEDDWDFLPPKKIKDPDASKPEDWDERAKIDDPTDSKPEDWDKPEHIPDPDAKKPEDWDEEMDGEWEPPVIQNPEYKGEWKPRQIDNPDYKGTWIHPEIDNPEYSPDPSIYAYDNFGVLGLDLWQVKSGTIFDNFLITNDEAYAEEFGNETWGVTKAAEKQMKDKQDEEQRLKEEEEDKKRKEEEEAEDKEDDEDKDEDEEDEEDKEEDEEEDVPGQAKDEL

SEQ ID NO: 699 - protein, 417 aa, Artificial Sequence
  calreticulin__Homo_sapiens__P27797
MLLSVPLLLGLLGLAVAEPAVYFKEQFLDGDGWTSRWIESKHKSDFGKFVLSSGKFYGDEEKDKGLQTSQDARFYALSASFEPFSNKGQTLVVQFTVKHEQNIDCGGGYVKLFPNSLDQTDMHGDSEYNIMFGPDICGPGTKKVHVIFNYKGKNVLINKDIRCKDDEFTHLYTLIVRPDNTYEVKIDNSQVESGSLEDDWDFLPPKKIKDPDASKPEDWDERAKIDDPTDSKPEDWDKPEHIPDPDAKKPEDWDEEMDGEWEPPVIQNPEYKGEWKPRQIDNPDYKGTWIHPEIDNPEYSPDPSIYAYDNFGVLGLDLWQVKSGTIFDNFLITNDEAYAEEFGNETWGVTKAAEKQMKDKQDEEQRLKEEEEDKKRKEEEEAEDKEDDEDKDEDEEDEEDKEEDEEEDVPGQAKDEL

SEQ ID NO: 700 - protein, 384 aa, Artificial Sequence
  calreticulin__Homo_sapiens__Q96L12
MARALVQLWAICMLRVALATVYFQEEFLDGEHWRNRWLQSTNDSRFGHFRLSSGKFYGHKEKDKGLQTTQNGRFYAISARFKPFSNKGKTLVIQYTVKHEQKMDCGGGYIKVFPADIDQKNLNGKSQYYIMFGPDICGFDIKKVHVILHFKNKYHENKKLIRCKVDGFTHLYTLILRPDLSYDVKIDGQSIESGSIEYDWNLTSLKKETSPAESKDWEQTKDNKAQDWEKHFLDASTSKQSDWNGDLDGDWPAPMLQKPPYQDGLKPEGIHKDVWLHRKMKNTDYLTQYDLSEFENIGAIGLELWQVRSGTIFDNFLITDDEEYADNFGKATWGETKGPEREMDAIQAKEEMKKAREEEEEELLSGKINRHEHYFNQFHRRNEL

SEQ ID NO: 701 - protein, 464 aa, Artificial Sequence
  N-myc__Homo_sapiens__P04198
MPSCSTSTMPGMICKNPDLEFDSLQPCFYPDEDDFYFGGPDSTPPGEDIWKKFELLPTPPLSPSRGFAEHSSEPPSWVTEMLLENELWGSPAEEDAFGLGGLGGLTPNPVILQDCMWSGFSAREKLERAVSEKLQHGRGPPTAGSTAQSPGAGAASPAGRGHGGAAGAGRAGAALPAELAHPAAECVDPAVVFPFPVNKREPAPVPAAPASAPAAGPAVASGAGIAAPAGAPGVAPPRPGGRQTSGGDHKALSTSGEDTLSDSDDEDDEEEDEEEEIDVVTVEKRRSSSNTKAVTTFTITVRPKNAALGPGRAQSSELILKRCLPIHQQHNYAAPSPYVESEDAPPQKKIKSEASPRPLKSVIPPKAKSLSPRNSDSEDSERRRNHNILERQRRNDLRSSFLTLRDHVPELVKNEKAAKVVILKKATEYVHSLQAEEHQLLLEKEKLQARQQQLLKKIEHARTC

1. An improved LAMP Construct comprising:
a. a Cysteine Conserved Fragment of a LAMP Protein; and
b. at least one cancer antigen.

2. The improved LAMP Construct of claim 1, wherein:
a. the antigen is placed at the N-terminus of the Cysteine Conserved Fragment;
b. the antigen is place at the C-terminus of a single Cysteine Conserved Fragment; or
c. the antigen is placed in between two Cysteine Conserved Fragments.

3. The improved LAMP Construct of claim 1, wherein the improved LAMP Construct comprises at least one fragment/epitope described in Column 1 or Column 4 of Table 1, and preferably is constructed as depicted in ILC-1, ILC-2, ILC-3, ILC-4, ILC-5 or ILC-6.

4. The improved LAMP Construct of claim 3, wherein each antigen is separated by a linker.

5. The improved LAMP Construct of claim 4, wherein the linker is selected from the amino acid sequence GPGPG or PMGLP.

6. The improved LAMP Construct of claim 1, wherein the improved LAMP Construct comprises more than one Cysteine Conserved Fragment.

7. The improved LAMP Construct of claim 1, wherein the Cysteine Conserved Fragment comprises a Homology Domain of a LAMP Protein.

8. The improved LAMP Construct of claim 1, wherein the improved LAMP Construct further comprises a Transmembrane Domain of a LAMP Protein.

9. The improved LAMP Construct of claim 1, wherein the improved LAMP Construct further comprises a signal sequence.

10. The improved LAMP Construct of claim 9, wherein the signal sequence is derived from a LAMP Protein.

11. The improved LAMP Construct of claim 1, wherein the LAMP protein is selected from LAMP-1, LAMP2, LAMP-3, LIMP 2, Macrosailin, Endolyn, LAMP5 or LIMBIC.

12. The improved LAMP Construct of claim 11, wherein the LAMP Protein is selected from any one of SEQ ID NO:1-113 and/or the cancer antigen is selected from any one of SEQ ID NO:114-197.

13. The improved LAMP Construct of claim 12, wherein the LAMP Protein is at least about 70%, at least about 75%, at least about 80%, at least about 85%, at least about 90%, at least about 95%, 96%, 97%, 98% or 99% identical to SEQ ID NO:1-113 and/or the cancer antigen is at least about 70%, at least about 75%, at least about 80%, at least about 85%, at least about 90%, at least about 95%, 96%, 97%, 98% or 99% identical to SEQ ID NO:114-197.

14. A polynucleotide encoding the improved LAMP Construct of claim 1.

15. A host cell comprising the polynucleotide of claim 14.

16. A composition comprising the improved LAMP Construct of claim 1.

17. A method of treating a subject having a disease or a disorder, wherein the method comprises administering to a subject in need thereof the improved LAMP Construct of claim 1 in an amount sufficient to reduce or treat the disease or disorder.

18. The method of claim 17, wherein the method comprises a priming step and at least one boosting step.

19. The method of claim 18, wherein the improved LAMP Construct of claim 1 is used in the priming step.

20. The method of claim 18, wherein the boosting step comprises administration of an antigen, an improved LAMP Construct, a polypeptide encoded by an improved LAMP Construct, or a cell comprising the improved LAMP Construct.

21. The method of claim 18, wherein the antigen used to prime is the same that is used to boost.

22. The method of claim 18, wherein the antigen used to prime is derived from the same protein as a second antigen used to boost.

23. The method of claim 18, wherein more than one antigen is used to prime and/or boost.
